United States Patent Application Publication US 2019/0144922 A1 - sequence listing, part 12

SEQ ID NO: 5 - DNA, 4063606 bp, Proteus mirabilis (residues 1-2,031,803 of 4,063,606)
tctgtaactcccccttattagtagtaatatgtatactacaatataagtaatgctcgaataaattttatttaaattgtaggtaaattgaggcaatagaaaagaaaaaatttgacatctctctcgctttgctttaaccagtatagggtcaaactaattttgagacagacaggattgttatgcgtacttacagcccagtgactatgaatacaattattaccaccaccaccaccggaattttatattgcggggcgggctgtcgcatataaaaaacaaaaaacgaaaaagcccgcattgagaaatgcgggcttttttttggcgaaaaatcaggagagctgtatgcgagtgttaaaatttgggggaacttcagttgccaatgcagaaagggtgctgaatgttgctgatatcgctgagaaaaaacgagagcagggacaagtcgctctggtattatcagcacctgccaagataacgaattacttggtggcaatgattgaaaaaacggcagaaggagaagaacctctcactcaagtacgagaagcagagcaaatcttcgctaatctattgcaaggtttacgagaaaatcaacctggttttgattaccaaggtttaaaagacaaagttgagcgtgagtttgctgagattaaacatatcctgcatggtatctccctattagggcaatgtcctgatagcatcaatgctgcgatgatttgtcgtggtgaaaagctttcgattgccattatggagtcggtgttacaagctagaggatataacgttaccgtcattgatccggttaaaaatctccttgctcaaggtcattatctcgaatcgacagtggatattcctgaatcaactcgccgtatttccgcccttaatattccgaaagatcatatgatcttgatggcaggtttcactgccggtaatgaaaaaaatgagcttgtggttctcggtcgtaatggctcagattattcagccgccgtattagccgcgtgtttacgtgcacaatgttgtgaaatttggacggatgttgatggtgtttacacctgtgatccacgcctcgtcccagatgcacacctattaaaaggcatgtcctatcaagaggcgatggaactttcttactttggtgccaaagtccttcatccacgcactattgcacctattgctcaatttcaaatcccttgtttaattaaaaatacgggcaatccagaagcaccgggtacgttaataggtgatggtcaaaaagatgacagcacgccggtaaaagggatcactaacctgaataatatggcaatgatcaatgtatcagggccaggtatgaagggaatggtgggtatggcggctcgtgtcttttctgtgatgtcgcgtgcaggaatatcggtagtattaattactcaatcttcatctgaatacagtattagcttttgtgtaccgcaaaaagagctaattagagcgcaaaaagcactgtcagaagaattctatctagagttaaaagatggcgtacttgatccgttagatattatgaacaatgttgctatcatctcggttgtcggtgatggtatgcgcacccttaaagggatctcagcccgtttcttctctgctttaactcgaggcaatattaatattgttgctattgctcaaggctcttctgaacgctctatctctgcagttattactaatgatgcagcgacgaatgcggtgcgtttatgtcaccaaatgctctttaacactaaccaaatcgtagaagtctttattgtcggtgtcggtggtgttggcagcgcgctaatcgagcagatccatcgtcaacaagcatggctaaaaaacaaacatatcgacctacgtgtttgtgggattgccaattcacgtgcgatgctaaccaatatgcaaggtatcgatttagataattggcaacaagcgctacaagcagctaaagagccttttagctttagtcagcttattcgcttagaaaaagagtaccacttcctcaatcctgtgattgttgattgcacttcaaacgaaatgattgcacagcaatacgccaatttcttacaaaatggctttaacgttgttacgcctaataaaaaagccaatacgatgtcgatggattactatcatcaaattcgccaatcagcggaagcatcacgtcgtaaattcttatatgacactaatgttggtgcgggtttacctgttattgaaaacttacagaacttgcttaatgctggcgatgagttggtgcaatttaatggtattctttctggctcactctcttatatttttggtcagctagatgaaggaaaaagcttgtctgaagcgacactttctgcgaaagaaaaaggctttacagagccagatccaagagatgatctctcgggaatggatgttgcacgtaaactgcttattctcgctcgtgaagcgggctatcaattagagttgagtgatattgatgtagagcctgttttacctagctcatttgatagtacaggtgatgtcgagagtttcttaaaccgcttacctcaagtagatgttgagtttgatgctaaagtcgaagaagcccaaaagtcagcgaaggtattacgttatgtggggatcatcaatgaagggaaatgccaagtcaaaataatggccgttgatgctaacgatcctctctttaaagtaaaaaatggtgaaaatgcgctagctttctacactcgctactatcaaccaattcctttagttttacgtggatatggtgcaggaaatgatgtcactgctgctggggtatttgcagatgtattacgtacactatcatggaaattaggagtttaaaggtggttaaagtttatgcaccggcgtcaattggcaatgtgagtgtcggttttgatgtgttaggagccgcagtttcgcctattgatggtcaattattaggagattgcgtaaccgttgaagcggcgcaagaatttcaacttcacagcaaagggcgctttgttagtaaattaccttctgatgctaagcaaaatattgtttatcaatgttgggagctattttgtgaaaaattaggtaaacaattacctgtctcgatgacacttgaaaaaaacatgccgataggttcaggattaggatcaagtgcttgctctgttgtggctgcactcgttgcattaaacgaatttgctcacaaaccatttagtgaaagccacttattattaatgatgggagagctggaaggccgtatttccggtagtgtgcattacgataatgtcgcgccatgttatttaggtggtttacaacttattttggaacaaaacgacattatttgtcagcctgtgccggcttttgacgattggtattgggtgatggcttatccggggatcaaagtctcaacggcacaagcaagggctatcctccctaaacaatacgataaagctgatattattaaccatggtcgttatttatctggatttattcatgcttgtcatacacaacaaccaaaacttgccgcaagcttaatgaaagatgtgattgcagagccctatcgaacacagttgctccctggttttgataaagcgagagaggctgcattacaaaaaggcgcgcttgcatgcggtatttcaggctcagggccaacgctgttttctattactgattcattggctattgcccaagatgtggcgcaatggttacaacaacattatgtacaaaacgatgaaggctttgtacacatctgccgtttagatactcgtggcgcaagagagatagggtaagtaatgaaattatataatttaaaagataaccaagaacaagtcagctttgctcaagctgttaaacaaggtttaggaaaacagcaaggactcttttttcccaaagacttgccttcattttctcaagcagaaattgatgcgctattaaaattagactttgcaacacgcagtagccgtattttaagtgcttttatcggtgatgaaattcctgctgatgtgttagcaaaacgtgtaaatacggcatttgcttttcctgcgccagtgacacaagtagaagaggatattagttgccttgaactcttccacggaccgacgctggcttttaaagactttggtggccgttttatggctcaaatgttatcagaagtcgcgggtgaccagcctgttacaattttaacggcgacatccggtgatacaggagcagcggtcgctcatgctttctataagctagataatgtccaggtcgtgatcctctatccacaaggaaaaatcagcccattacaagaaaagctattttgcacattaggggagaatattcatactgttgctattcaagatgactttgatgcttgccaagcattagtcaaacaggcatttgatgatgaatatttaaagaacaccatgcatttaaactcggctaactcgattaatattagccgcctactggcacaaatctgctattactttgaagcggttgcacaaattccagctgaaaaacgtcaacaattagtcatttctgtaccaagtggtaattttggtgatctcactgcaggattactggctaaatctatgggattacctgttaaacgctttattgcagcgaccaatgtgaatgataccgttcctcgctatttagatagtggtaaatgggaaccacatcggacaatagcaacactttcaaatgcgatggatgttagccagcctaataattggcctcgtattgaagagttatatcgtcgcaaaggttggctgttatcggatctttcgcatggggctgtgagcgatgaaacgacggaaaaaactgtacgtgaactggcacaaaaaggctatatttcagagcctcatgcggcggttgcttatcgtctattacgtgatgagctacaagaaggagaatatggggtatttttaggtacagctcatccggcgaaatttaaagaaaatgtcgagcgtattttaggtgatacattacctttaccaaaagaattagctgagcgtgctgataaaaaattactatcgcatcttttaccggcagatttttctcaattaagagcatttttgttagaacgagcacctaaataaatataattatttatattaattaattttgtttttattaaaaagctcactataatggtgagcttttttattgttttaaataattttatacccaaataaaaataagaaaataatcatttaatgctaaggagaattacactagtttttatctcttaatgtaattaacaataaagaggtagactatgggtagatttaagaaaattaatatcaatgatgatattgaaagaattacactagaaatagtgaaatatattaaagagcatagtgttgaattaccttttaatattgattcagtaagacgtgttttaattgagaattatatttatattcttacttataaaaatgaatatgctgctaatgattttttaataaaaatagaaagtaatttatctctttataatcgggataaatttactaaagcgattgattttattgtaaaagagattaatgcaagtatagagaatttatttgttaataattcttatcttacaaacaaaaattatcaaaagctaaataaaacacgtattaattcagtatttcagcattacccatcaggattttttcacttaaaaatagaaaataaaaacttatttatacagatagataataccaatcaattatttaaaatcattgactttgaaggtacagtggaattcttttctaaaaaagatgaccttattcatactattaatcaaatggttaaaaacagtgttgctgataactctatatcttaccgattttacgctaagaacgaatattttaatttctttactctcgataaatattggcaagtaacacctaaagatatttatgccgaagttattaatgatattaaggcaaaaaaacaggtacatattgatagtcatttaactattgaattaatagatagctattcatataaaaatatttttattgttagagactctaatgaaaactcagaaaaaatactccatatatatcttaataatattgatgaagcattcttgattgccgtagctaaacatcgtcagctaaaagaaaatggtgaacatttactttataaattaaataaggattggttctttactaaaatgaaagataaatccgttaaatatttttcacaaacttctgatttattaataccattagaaaagataatgggcagaattaatcttgtcgcttcagctgaaaataattataattttagccattttgatccactttcaggagtatgttatggaataagtttgaaatatttattggaggttagaaataatggtatagaaggagggaataaatatttacattggctaaaggaaaatattaacctttacaaggacaaaaaagaaaagatatctgataagcttgaaaaaattatatttgatagtgtacaagaatatgaagtattaaaattgattaaagagatcaaggaaattaaattcgcacagatttttcaaatggagagaatatatgaaaaaataaattatacaatttttgatttaacaaaggcgaccgaataccgaaaaattttagcagaaaatggcttgaaagcatcgaatgcaaataggctagaaagtagtctctcacaaataaattatcacttagaatatataatgcaatattataatgaatattatgcgattattgcatttaaaacacatgccattgctcttgcttataagagatattctaataatcattataaatttacgctatttgattctaattctgaattgacggaattttctaatatagaatcaataaaagacgctttaataaaaataatgggctcttatactctaaataaagctgatggaaaagaatattttataattgatgaatataaaagaaatcctacaacaaaatatcgtagtttatgggatcaaaatgaaatcgagttacataaaggtattgctgaaaatataaaaaaaattggtttttcattgccttttaaagatggtgttgttggacgagttattcattacagtgaacagcgtgatctcattttagaacttaaaataaatagtaaattagttgaagttgtggtcaaaaatgtttttgttgatgagggaatatttttagttaaaaataatttagataaaattcttgagaataataaatccagtaaagtaattataatgagcaatagtgatggtattgatattcaatttactgaatttaatgcacatcaaaaaatgagtaagccaaaaggatatctggaatttaatgatgtttattatcgagatttaattaagattaatagttatttattaaatggtaaaaaatcattttcattgaataaaattgtttcattaattgatacactaagggggaatatttattttgataaaataacagccagtttttctataattgatgaaattatactatttaatcaaaacaatgaaaatatttctcttgttgatatcctgaatcaagtgaaacagaaaatagaagataaattattctatggtgatctcctttatggaaaggaaaagttaattgcattagcacaaaaaaatagcctagtagcagcaattttttatcgaatgatggttaatgaaatcaatgaaggttatactggaattagtaattttatttatgagcaaattattgataacccttttttaatattagataaaaatagaaatgtcggggttgttggttatgattatacgattaattttaaaaataattataaagcgttaaaagaaattattgatggtattgatatttctgaaataaaaaatatttttcttttagatgatgaaaatagactgcacttaaaagtaacttatcaaagattatcagaatatagaaacaacaagtatgttaataagcttcttcatttgattgaagatgaaattgattctataaaaaaaatagataatacaggtgtttatcgtgatttatatcttgagttttttagcaatcatcagtttaataatagagtgattattcatgaaatagcacaattagaaagttattttaataataattatcaggagcgaaaccatggctatcatcctagtaatttttatattaatgaaaatgatcctcttaccctactagaaaagtcatttaatcagaacaaaaatgaaatagatggtagttatctgttatttaatgaaagtaaagaaaattttgattttttatttgttgataataattttattactagagattttgtagataatattattattgaaagcattagtggcgtttatcaagatgatatcgtcatttatttctataatggtgtaaaaagtgaacaattaacacaatacttaaaagataaaccagaaataggccgttttcttgattattgtttaaaacatgaaataagagtgattgctgctggaaatgaagaatactttcctgccaccaatgcgcttgttaagcagaaaagccgtgttgaatcactacaaaatgttattttacaacatcaatttgttggtgaaagaacaattgtttttgccaataaggagactttatttagttatcaaagtggtcatttatttattgaagggattgctcagcggctaaatatgcctatttatactgtgacggataacaatcttatacttgaaaatgaatacattatggtaaaaccgacgactgaaagtcagtttattggtcaccctttacttgctgatacaggtgcatctaatacgctacttactgaaacagtacctaatgagcctaatacaatgtctaataggcaaagagtagatattgaaaataaaaactatgctgcagaaatttatcaattcgtctcacacaattacactaattatagagataatcaagagtttaagttaggttatcagaatgagattagcacgattttttctggctattctgacaatatgaccattgctgatattttaaattacattcagttaaatcgctatcagattaattatactcaattaggcacaattattaggaaagttgatcaaattaatcttaaatatcataaagaaaaactcacagaactcagtgataaaataattaatcatgatttactcattgataatgcaattgagaaatatttggttgaattatcggcagtatttaatacgtcagataatagtttaataaaaaggaatttaattcaatcactttatgatccctctgttaataaagaatttaaccaatttttaatggatggaatgaactttgaacagtggcaagaaataactaataaagactatggaaactataatttaacggaaagaacgtatcaagttattgaaattattcatgcgatttatgatactcctcacttaatagataatttaagtgaactatctaaaaataggcttaatgctttttttgatgagggtaataaaggtattttatcacgagtattattgagcaaaatttcaagctttgaactctataaagagaccataaataatttaaaaaaactcgctgttatcagtcagtctgatgaagagattagcgctttatcgccgacagaagcattaaataaactcaatgaatttaaaggtgaagttaacttagccacaagtgaagatagctctaccatttcttctaaagtggaaattaataatcttgtcattgacaaaagattactctgttatttaggtgcaaagataaatggtgaaagtatcgatgcgatagatcttaatcagatagagaactgggataaaaaaattacttttgatcctcagcatcttaatgattattttttatctgtgacgggcaatgaaaaagataaagaagttattgcattattacgttatctattaaataacaaacaagataaaattaaatattttctttctcatatgtccagtagagctgattatgtcgcggctcatgaaagattaatgaaaataatagcattaggtagtaaacagtataatcagcaagattgggaaaatttaagaataccttcattaaaaattcccagacatatgagagttatcagtaaaattggttacgctaatattagcttcggtatatggcaatcaatcaattcaacctttatgcttgctgagcaacttaataatccgctattaacccctcaagagcatagagagatcatcaataatcttgccataacatggtcagaaatggcctataatggcttatctgaactcattgaaatcgctttagctaaaggattattaaagtaccgtaataatcctttggagtatattagtaaaaccagcactcgaataggtatcgggcttaatatcctgtctattggatttgatatctataatatctacgataactttagtcgtatctcagtagaaaaaaatgaaaaacgacgtattgactatattgtaaatggctctttagctatagtctccggattggtcactttgggggtttctatcgcaatgcttgctggctctacggtcgcggggcctattggtattgtcgcgggagctgttatcgccttagccatttcaatttataatgccgcaagactgatagaagaagcgaaagaaaaaataggatttacaccactagaagaacttaataatggtttttatgcatttttaatgggggatatcttaccaagcaaaaagaatgaaatcgtctatttagagacaatatcacagttagaaaccatgattgaccaaaatgcgcaagaacatcttaaagaaataaaaaaacaggagcctcacagttattatttttatacgaatgagaaacaattttatgaagaacatcattattataaagtgatccctcgtatattggggaaaacgttagataatatacttaatccgtttggagaaattgttgtacaacgagtggcgaaaaatttaagtaaagaagaagcagaaaagatagctgcgctttctcattatcttagtgtcgaaagaacggaatataaatactatgttcctaaagaagccatcgcaacagatgaaattctcatttttgatatggatttttatgttaatcaattaaatcgttatacgattaattttgcatttgaagatgataatcctgtttttgaggatgaggtggatatctctttttttgataaaataagaacaacaaaagaaaaaacatggcaaaatttatcatcaggagaattaacagatgatttaattaaatcaacagctgaaaaacaatattttgagccaagttggcgtgagaatgagctattttattttaatacttataatggggatgatattattgctgcaccattaataacacaaaatatatttgatgttcataatgggactaaacgattaagtggaggagaaaaagatgacacctttaatgtgttcacttctgaatctcctcgttatgccagccgtttttatggtagagaaggtaatgatacattacgtattattcagacagaaaaaaaatatatagggtatgaagttaatttatctaaaaattatattaaatttatcgggggagaaaataaatccaatagccagagttttcatgccagactttttatctttcaagagcaaggacaaatctatacccataaattagcggatacaatgcctaatataacactacaaagacaacccgttattgcctatttagagagtattgaaaatgtagtaggcagtgaaataggtaatgatattatttatggtgaccaaaaaaataactatttaaatggcatgggaggggtagattcattatatggattagctggagatgatacgctggtattacgggaaggttatgcacaaggaggggcagggaatgatagttatactattctaagagcatcaaatacagataataatgttaaacaacttgaaactattattgatgaagagacgcatacagaagctagtcttatccagttaaattatacttttgatgaaattgctgctatttctcgtcgtgaaacagatattgtttttacgcttaaagttggtaatgataaagatcctgatcaatttatcgagcatttaattgcattaagtcatgtataccaagataaaaatagtcaattattagcccatcgatataccattgtgactatggatggttttatacttactattaatgaaaataataatcaaccaagagaggtatcatataactttagttatttagaaaagtataatcagcaagagaaactacaacagctttctgttaatgacgataaacacacattgtctattcaatctgaaaataaaactaaacttattcaattattacctgagctacaatacagtggtttctcttctggagaacatttaaagcttaatctacagggtaatagcgaaaataatcattatgctggaattgcggctcattcatcaattaaactgagtcgcggttatgacaattatcaaataagctcattgctagctaaaaatagaaatgaaaagatcattatttctctgagtgataatgataaacaattaacatctgattgtactagtcatttctttttatccgatgtgagtggatttgatttgatgtttagtgatggcgttttatctcatcgctataatcctgatgctcatattaaacttgttttcgatacggaaagtgttagtgctatttttaactcaggaatgacacttcaatttattgataaagataatcgagtttttcatttgcctaagccagacagcggtcagcgtttactgatccccactatcactttggatgttaggttgagtcatcaaagtgatgttctgatgatcccaccctccctacgtttaaataaagaggcattatcattgtatcctcagtattttcatagagaagaaccatcatcacgttcaacgcaattacagcgtattatatccactcaaacactagagccttatccattaaaggtaacagaattactgagagatgatattgctgttaatgataatcaacctgttaattctattttgtctctcaataaactattttcaaacagatcacaagatatattctctcaagctatagatttattaccaatgatagaattaatggatggtgatgatattgttgttaatcataatcaaagtagctcagtgattgatgggggtaaaggtgatgatcatattgttgtcaatgaagggcaccatattttaattgctggagaaggtaatgataatcttaatggcggaagtggacatgatctgtttatttcaacctcaggaaatgattatctaggtggaggaagtggtaataatgtttatgtggtacaaaaacgccatggtgaagtgacggtgtatgatgaaggtgaaatgagccatatttttgtatcaggattatctgagcatgaaaaattaatatcctctcaagcaggtaaagataaacagtatcgaacggctgataatcaatttgtcttgactgttaaaacaaaccgagtagagaaaatagaaactgatcctgtgaaggttatcgaaaaagaacagacattatcaatgggatcccttgcgacaattattcaacaaatggctcaatttaatcagcaacaactatcgacgatgcaaggcagtgacgttattccctcatcaaactggtcgcctttagctgtggtcgttaagcatttataatttcccttgtgacccaataaaaatagccctattttcagggctatttttatgaattactatcatttgatagcaaaaaatgaggcttattttgctagatgttctgcacgtttaaagacaagggtattgccttcagactcggcggcattaaattgataaccctctagattaaattctttaagttgtgccttatcacttaatctttcttgaataataaaacggctcattaaacctcttgcttttttagcataaaaactaatcactttatatttgccatttttctcatcaagaaaaacaggtttaataatttccgcattgagtttttttgggttgactgatttaaaatattcatcagaggctaaattaaccaagatattatccccttgagcttcaagggcgttatttaacgtttcagtaattatgttaccccaaaactggtatagatcactgccttttttattgttcagttttatgcccatctctaagcggtaaggttgcattaaatcgagtgggcgcaatacgccatataaaccggaaaggatacgtaaatgctgttgtgcaaattgaaagtcgtcatctgtgaaaagttcagcggcttgcattccggtataaacatcacctttgaacgctaaaatggcttgtcgcgcattatcgggtgtaaagtcaggttgccattcaccaaagcgagccgcatttagtcctgccaatttatcactaattttcattaagcttgcgatatcactggacgacagttttcgacattctgtaataagttgttgggaatattttagcaattcaggctgggtgaactgcgttgttgctaaaggcgattcgaaatccagtgttttagctggtgaaatagtaattagcataattccctcaatagttattttgatttagttctactatagcaaattgtttggtagataagttaaatcataataataggaaaaaacaatactttcaccaatgtgccataaaatagacatattaaacgattcagcctgagttgttattctgttttttgctacttttgttttgcgaaatcgtttggcattcaaataattgctttcgatgaatctaagcatcttgtagtgtgagcagtccatgttattatcaatagatatccgcaggtgactgcaaacagatttacctagtagatgagataaacaaaatgaccaacaaattaacttctttgcgtaaactgactacagttgtagctgatacaggtgacattgcagcaatgaaactgtatcaacctcaagacgcaactaccaacccttctttaattttaaatgcagcccaaattcctgaatatcgtaaattaatcgatgaagcgattgaatgggcgcgttcacaaagcgattctcgcgagcaacaaatcgttgatgcgtgtgataaacttgctgtcaatatcggtttagaaatcttaaaactgatcccaggtcgtatttcaacagaagttgacgcacgtctttcttatgataccgaagcctgtatcgtcaaagcgcgtcgtttaattaaactgtataacgaagcgggtattagtaacgatcgtatcctgattaaacttgcttctacatggcaggggattcgtgcagctgagcaattagaaaaagaaggtatcaactgtaacctaactttactgttctcttttgctcaagctcgtgcatgtgcagaagctggtgtatacctgatctctccattcgttggccgtattatggattggtataaagccaatacagataaaaaagagtttgcaccagcagaagatccaggtgttatttctgtaactgaaatttataactactataaagagcatggttataacaccgtcgttatgggagctagcttccgtaatattggtgaaattttagaattagcaggttgtgatcgcctaactatttctcctgcgttattaaaagagttatcagaagcacaaggtgaagtagagcataaactatcctttaatggtgaagttaaatcacgtcctgcgccaatcactgaagctgaattttattggcaacataatgctgatccaatggccgttgataaattatctgatggtattcgtaaatttgcggttgatcaggaaaaattagagaaaatgattgcagatttattataatctggcgtttaattcttataaaaactgacaacacccactttaaataggggggtgttgtctttttttttattgcaaaataatatttaaaataattttaagattaaattgatttgaataaataatttatccggtaataattataaaaattaattattaaaagcatcctatttattattggtgaattatgaaaaagatggttttggcaacagtactggcatcgctcttttttagtagtgttgctatgtcagaagataaaacagccttctctttacctgcgattgaaaaaagtgcggaagaagggaatgccgcttctcagtatcaacttggtgttaaatatgaaggtggcgaaggtgtagaacaaaatacacaaaaagcattggagtggtacacaaaagcggctgaacaaggtcatgcagaagcgcaattaaatttagcgttaatgtatgatatgaatgatgatattgagcgtgatgctgaaaaagcggtttattggtataacaaagcggctgttcagggactctctttagcacaatacaatttggccgtctcttttgatgaaggggatggtgtagagcaagatcatgaaaaagcagtgtattggtatacaaaagccggtgagcaaggtgatagcgatgcgcagtataatttagcgatttcatatgatgaaggtattggtatcgaacaagatcatgaaaaagcggtgacttggtacactaaagccgcagagcaaggtcatgctgatgcacaatacaacttagctgtctcttacgatgaaggcgaaggggtcgagcgtgatggtagcaaagcggtattctggtataccaaagcggcaaatcaaggtaatcgagatgcgcaaaataaccttggtgtgatgtatgacgaaggtgatggtgtagcaaaagatcaacgtaaagcgaacgaatggtataaaaaagctgcgctacaaggtaatggcttggcacaaaataaccttgcaataaactattattatggcaaaggggttaaacgtaacttgaaagaagcctatgcatggtttgctgttgctgtagaaaatggtgaaggtgatgaggctatgctaaaacgaaccgcccgtgccctcaatgctgctcaattagcagaagctaaacttttagctgcttcttatattgctaaatatcttgatgactaagattaaatcattaatgtgataaaaaacgggagtataaaactcccgttttttcatagctaaaataacataatagcttttactgagattgtttttaattcacccgtgttctcgtgttaatatcagcacgctaattggcagttattgattaatttgaggttgatatgaatgaattacgtataggactggtttctgtttctgatcgtgcatccagtggtgtttatgaagataaaggcctgcccgctttagaagcttggctaaaaaaagcaatcacaaccccttttcatatcgaatcacgtttgatccccgatgagcaactgatgattgaacaaacattatgtgaactggttgatgaagcaggatgtcacttggttttaacaacgggaggcacagggcctgctcgtcgtgatgttacgcctgatgcaacattggcgattgctgatagagagatgccaggcttcggtgagcaaatgcgccaaatcagtttgaaatttgttcctacggcgattttatctcgtcaagtgggagtgattcgtaatcaagccttaattttaaatttaccgggacagcctaaagcgatcgcagagacattagagggattaaaagacagtgagggacaggtgattgtcagtggtatttttgccagtattccttattgtattcaattattggatggcccttatatcgaaactaacgaagaaattgtggttgcctttagacctaaatcagcacgccgttctacatctgcttaatacattgcatcggttgtttttgttattaatatcgaatgtgagtacgttttgccctaataagattaaataagaacaacctgctatttttacctatgagtgatgcttctgttgatgatttattgatcattgagataaccccctttgtgtaataattgattgaaactgttatatttcaattggttattttttatattaatggattatcgctgttgttttacatcatcataatgggtgaaagacaatactttctataacctattgatatataatatttattttttatattgttattttactagatcttttttttatctttttactatttttttttatttttccccttgatgaatgtatttatgaccccatctatttttcaactgcaattaccactattgagttgcgttgatgtttatccgctttgtgatgatattgagtccattaattttttgacttgaaaaatgaatattcatcctcatatagattggtaatcaaattgataaagaattctctttggaggcgtttaaatgggtaaaattattggtattgacctgggtacaactaactcttgtgttgctgtaatggacggtaagaatgcccgggttattgaaaacggtgaaggcgatcgtaccactccttcgattgttgcatatgcacaagatggtgaaattctagttggtcaaccggcaaaacgtcaggctgtgactaactcacaaaatacattatttgccatcaaacgtttaatcggtcgtcgtttcgaagacgcggaagtacaacgtgatgtttctatcatgccttacaaaattattaaagctgataatggtgatgcatgggttgaagcacgtaacgaaaaaatggctccaccacaagtttctgctgaagtattgaaaaaaatgaaaaaaacagcggaagattacttaggtgaaccagttacagaagctgttattacagttcctgcttactttaatgatgcgcaacgtcaagcaactaaagatgcgggtcgtatcgcgggcttagatgttaaacgtattattaacgaaccaacagctgcggcattggcttatggtttagatcgtgaagtgggtaaccgcactatcgctgtttatgacttaggtggtggtacattcgatatctctatcatcgaaattgatgaagttgatggcgaaaaaacctatgaagttctgtcaaccaatggtgatactcacttaggtggtgaagacttcgatagccgtttaattaactacttagttgatgagtttaagaaagaacaaggcattgacctgcgtaatgatccattggcaatgcaacgtctgaaagaagctgcagaaaaagcaaaaattgaattatcttcagctcaacaaacagatgtgaacttaccttatgttactgctgatgcgacagggcctaaacacttaaatatcaaagtgactcgtgcaaaactggaatctttagttgaagacttagtaaaacgttcaatggatccagtaaaagttgcattagaagatgcgggcttgaaagttagtgaagtaaacgacgttattctggttggtggtcaaactcgtatgcctatggtacaaaaaactgtggctgagttcttcggtaaagaaccacgtaaagacgttaacccagatgaagctgttgctatgggtgctgctgttcaaggtggtgtattagcaggtgatgttaaagacgttctgttacttgacgtgactccactgtctttaggtattgaaactatggggggcgtgatgacttcgctgattgcgaagaataccactatcccaactaaacatagtcaagtattctctaccgctgaagataatcaatcagctgtaactattcacgtattacaaggtgagcgtaaacgtgcgagtgataacaaatcactgggtcaatttaacttagatggtattcaacctgcaccacgtggtatgccacaaattgaagtgacttttgatatcgatgctgatggtatcttgcatgtatctgcaaaagataaaaacagtggtcgtgaacaaaacatcaccattaaagcttcttcaggtttaaatgaagaagaaatccaaaaaatggtacgtgatgcagaagctaatgcagaagcagaccgtaaatttgaagagttagtgcaaacacgtaaccaagcagatcaattagttcacggtacacgtaaacaaattgaagaagcgggtgacaaattagcggctaacgataaagaagctatcgaaaaagcgttaagcgaattagaaattgcttctaaaggtgaagataaagctgctattgaagcaaaactgcaagcgttagttgaagcttcaaaacctctgttagaaattgcacaacaacaagctcaagcgggtgcaggtaatactgccgatgcaactgatgcaggtgcgaagaaagatgacgatgttgtcgatgcagagtttgaagaagtagacggcaaagataaaaaataatgcccttaacgggccgcggtaactcaatgatgaacagttactgataccgaaacacgggcgtcgaggcaactctacgcccgtgtgcttatgtcaagggtaatccagaatggcgaaaagagatttttacgaagtactcgggttaagtaaaacagccgatgaaaaagagatcaaacgtgcttataagcgtttagcgatgaaatatcacccagatcgtaatcaaggtgataaagattcggaatctaaatttaaagaaattaaagaagcttacgaagttcttagcgatccacaaaaacgtgcggcctatgatcaatatggtcatgctgcctttgaacaaggtggttttggtggtcaaggcggtggtggctttggtggcgctgactttagcgatatctttggtgatgtgtttggcgatatttttggtggtggtcgtcgtcaacaacgtgctgcacgcggctcagatttgcaatacaacatggacttaacgctagaagaagctgttcgtggtattaccaaagagatccgcattccaaccttagaaacctgtgataaatgccacggaagtggggcaaaagaaggcacatcagcggaaacttgctcaacatgtcatggggcaggtcaggttcatttacgtcaaggtttcttcaccgttcaacaaccatgccctacctgtcatggtcgcggtaaagtaattaaagagccttgctctaaatgtcatggtgatggccgtgttgaacgttataaaaccttatcagttaaaatcccggcgggagtggataccggtgatcgtattcgtttaagtggtgaaggtgaagcgggtgagcaaggagcaccggcaggcgatctgtatgtacaggttcatgttcgtcagcaccatatatttgaacgagatggtaataacctctattgcgaagtacctattaactttgcggttgcagcattagggggagaaattgaggtgccaactctcgatggtcgtgtgaaactaaaaattccagcagaaacacaaactggcaaaatgttccgcatgaaaggcaaaggtgttaaatctgtacgtagccatggtgtcggtgatttaatgtgccgtgttgttgttgaaacgccagtgaaactgaatgaaaaacaaaagcagcttatggaacagctaggtgaatcatttggtggtaaaggtggtgaaaaaaatacaccgcgctctaagagtttcttagatggagtaaaaaaattctttgatgatttaaccaaataatttttgcgttatcttcattcccaaaaagcctgataatgtattgcctatcaggctttttcttattaatttcataaaaatacctagaaacttattctctgttatctttaatagtcattcccctcttatttcattaggtatcctctggtaacaaaaaaggttgaacaatattatattcacctcttattattcttgtgagtaaattatcaactattcttaataaaaagcacactatagtcacaataatatggataaaaaatagaatatttacctgttttctatcaattcttattttaaatgtgaattattacttatgtttatcataaaaaataattgtatcaataggttgtattttattttttttatttttgttttttatctttcgtgatattacttattgattattttttacataattccttctttactcttgatataagcgattgagatcgaaaaagccgaattatttttgctaaataatctgttttttacgaattcataattagcatattattaacacaaatagacatttttaggttaacaatatgacagcaattattagacaatttttaagattagaggcatcaggcggtattcttctgattgttgctgctattatcgcattaataatggcgaatacacctcttagtgctttgtataatgagtttttatctatcccaataatgattaaatttggggcattagagctagataaaccgttgatcttatgggttaacgatgcactcatggccatctttttcttagtggtaggattagaagtcaaacgggagctaaaagaaggttcattagcgcaacgtgatcgcgctatttttcctgcaattgctgcagtaggaggaatgttagcacctgctttgatttatctattttttaatcatggcgatgcgattggtcagcaaggatgggctattccggcagcaacagatattgcttttgctctaggtgtaatggcgttactagggcgtcgcgttcctgtggaattgaaagtctttttattagcgctagccattattgatgatcttggtgtcattgtgattattgctctcttttattctaagagtgtggcattagtcccgttattattggcagcgctaatcaccatcatgttgtttattcttaattggcgtaaagtgagtaatacagcagtttacttagtcctaggctttattttgtgggtgtgtattttgaaatcaggtatacatgccacaatagcgggagtgattgttggattcctgatcccattaagagataaagagggggcttcaccgtcggaagagttagagcatgttttacacccgtgggttgcctacttaatattaccgctatttgcttttagtaatgcgggggtttctttaaatggcgttacccttgatggcatgttatcgaccttacccgttggtattgcattagggcttttcttaggtaagccgattgggatttttctctttagttgggtttcggtaaaactagggattgcaaaattgccagatgcgattaatcttaagcaaatatttgccgtttctgttttatgtggtatcggttttactatgtctatctttatcgcaggtcttgcgtttgaaggtgctatagaagcctataatacatactctaaactgggtattttagttggctccaccatggctgctgttgtgggatatttattgcttaactctgttttaccgaagttgaagcagaagcaaaaatagcgaaattgagtagggaactcgttttctaaacacaataaaaaccgagctataaacataaacctacggcgcaataccttgtattgtgccgtaggtgtttttatgaggattggagaaaggaacaccaatcgctaatgcgttgttaacgaagtctgtgtgatgagatcacagaagttgaaaggaaaatcactatgcgtgtgtcacatctcaattttaatcatctttattatttttggcatgtgtgtaaagaaggctctgttgtaggagctgcggaagcgctgtatctgacacctcagacaattacagggcaaattaaagcattagaagaaagattagggggaaaattattcaagcgtcaagggcgcggattagttccctctgaattaggtcagcttatttttcgctatgccgataaaatgtttatgctgagccaagagatgctagatattgtcaactatagtcgagaatctaacctgttatttgatgttggggttgccgatgcgttatccaaacaacttgttagtcgtgtattagaaacggcggttattgatcatgaacaaatacatttacgctgttttgaatcgactcacgaattgttgttagagcaattaagtcagcataagttagatatgattttatctgattgtcccgtagattcctcacaacaagaggggctgttctctgttaaattgggtgagtgtagtgtcagttttttctgcagtcagccaataccagaaaagccattcccagaatgtttagaagatagaaaattgcttatccctggtcgacgctctatgttaggtcgtcatttgttaacttggatacgcaataaaaatcttcaagtagaaattttaggtgaatttgatgatgccgcattaatgaaagcatttggtttaaatcataatgctatctttgttgcaccttctatttataccaatgagacatttgtccaaagtaatattgaggaaataggcacattagactcggtaaaagaagagtattacgttatttttgctgaacgaatgatccagcatccggcagtacaacgtgtatgtaataccgatttttcagctttgtttagtggttaaaagaaagccaataacgaatgaaatacgtagagtttgcatagacagaatgtaaaaaaaccggcctaagccggttttttaaacacaaaaacaataattacattgctttgatttgtgcttgcagattagctttatgacgtgctgctttattcttatgaattaagcctttagttgcctgacggtcaacaattggttgcatgtcattaaatgctttttgtgctgcttctttatcaccagaagcaactgctgcgtatacttttttgatgtaagtacgcatcattgaacgacggcttgcgttgtgctgacgacgcttttcagactgaaccgcacgtttcttagctgatttgatattagccaagttccaactcccaaatatattctagcgaggacaatacaaaggtgaaggaatatgccttttcaacctaagtttgtcaatggatttatacaaaattagcgtcgttgtacgcgacactggtttcgttgtgatggcgcaagattttatcagttaagacgggtagaatacagtcttttgagtgaaaaaatcatcaaaatcgtgtatatgagtaataaataatagattctaagcggatctacggttgattttgtgcgattttataaccaacaagtgagtaatcgtttattttttgttagcagtgagcatgttaatttaacaatcatagtgaattgacaaagcaagatattactcaccaataaacattgatatattgggttactctcgagcctttgacaaggtataatccaattatttccacggtattgagccagttatggagctaattcgcggtatacagaatattcgagcacaacatcatggttgtgttctaacaattggcaattttgatggtgtccatcgcggtcatcaggcattattaaaacacttgaagcaagaagcatcacgtcgtggcctacctactgttgtgatgacatttgaacctcaacctctggagttttttttgccagagaaagcacctgctcgtctaacgcgcctacgcgataagataaaatatttggcagagtgtggtattgattacctgttatgtgtcaaatttgataagcaatttgcggcacaaacaccggaagagtttgtttcatcactcttagttgataaattaggtgtgaagtttttagccattggcgatgattttcgttttggtaaaaatagagcaggtgattttcattttttacaacaagccggtgctcgatacggatttgaggtggcaaataccgaaagttattgtgacaaaggattacgtattagcagtacggcggtacgagaagccttattcaatgacgatttagcattagctgaatcattgcttggacacccttatagcgtttgtggacgcgtggtacatggtaatcaattaggcagaactattggttttccaaccgccaatattcccatgaaacgcttagtggcacctgttgctggtgtttatgcggttgatgtttatttagccgaccatcaatcgcctttagcgggggtggctaatattggcagtcgtcctaccgtaaaaggtaagggtgtacaattagaagttcatttaatcgacgttaatatggatttatatggacgtcgtattgatgttgtgttacgaaagaaattacgtaatgaacagcgatttgcatcattggatgcgttgaaacagcaaatcgcaaatgatgtggctgctgctagggattttttattgcagcggtcggagtcataaactagcggaaacttggaactgagaatcgaatgagtgactataaaaataccctgaacttaccagaaacagggttccctatgcgcggggatttagcaaagcgcgaaccagaaatgttatcacgttggtacaaagaaggtttgtatcaagctatccgtcaagctaaaagtggtaagaaaacatttattttgcatgatggccctccttatgccaacggcaatattcatattggtcactcagtaaacaaaattctcaaagatattattattaaatccaaagggctgtcaggctttgattctccgtacattccaggatgggattgtcacggattacctattgaattaaaagttgaacaaattgtaggtaaaccaggagaaaaagtctctgcagctcaattccgcgaggagtgccgtaaatatgcttatgagcaaatagaggcgcagaaaaaagattttattcgtttaggtgtgctaggagattgggacaaaccttatctcactatggactacaaaacggaagccaatactattcgtgcattagcgcgtattatcgctaatggtcacctattaaaaggggcaaaacctgttcactggtgtacggcttgtggttcatcgctagctgaagcggaagtggaatattacgataaaacctctccttctatcgatgtgcgtttccgtgcggttgattcaaacgctgtagcggctaaatttggtgtcgtcactgataaacctatttctttagttatttggactaccacaccatggacattacctgctaaccgtgcaattgcattaaatggcgaatttaattacgcattagtttcatttgatgatgagtgcgtcattttagcggcagacttagttgaacacgttatgaaacgtatcggtgtcacagactgggctgttttaggtgaatgtaaaggtagtgatttagaattattgcgcttcaatcacccatttatgggctttgatgtgccagccattttaggcgatcacgttacattagatgccggtacgggggctgttcataccgcaccgggtcatggtcctgatgactttgttattggtcaaaaatatggtttagaagtggctaatccggttggacctaatggttgttatcttcctaatacgtatccgaccttagatggtgtgtttgtttttaaagctaatgatgtgattgttgagttactaaaagaaaagggtgctctattacatcatgaagcaatgcaacatagttatccttgctgttggcgacataaaacaccggttatcttccgtgccactccacaatggtttatcggtatggataaaaatggattacgtcaacaatccttaaaagagatcaaaggtgttaaatggatccctgattggggccaagcacgtattgagtcaatggtggaaaaccgtcctgactggtgtatttctcgtcagcgtacttggggaacaccaatgtcgctgtttgtgcataaagaaacacaagagcctcatcctcgtactctagagttaatggaagaagtcgctaagcgtgtagaagtgagtggtattcaagcttggtgggacttagatatccgcgaactgctgggtgatgaagctgatgactacatgaaaacacctgacacacttgatgtttggtttgattcaggatcaacacactcaaccgtagttgatgctcgccctgaattccatggcaattcagctgatctctatttagaaggttcagaccaacatcgtggttggtttatgtcttctcttatgatttcaacagcaattaaaggcaaagcgccttatcgtgaagtattaacacacggttttaccgtagatggacaaggccgtaaaatgtcgaaatccattggtaatactgttagccctcaagatgtaatgaacaaactgggtgcggatattttacgtttatgggttgcctccaccgattatacgggtgaaattgcggtttccgatgagatcttaaaacgttctgctgatacttatcgtcgtattcgtaatacagcgcgtttcttcttagcgaacttaaatggctttgatccagctaaacatcaagttaaacctgaagagatggtaatacttgatcgttgggcggtcggtcgtgcgaaagcggcacaggaagatatcctcaagcattatgaaaactacgatttccataatgttattcagcgtcttatgcagttctgctcagtagaaatgggatctttctatctagatatcattaaagacagacaatacactgcgaaaagcgacagtgttgctcgccgtagttgtcaaactgcgctataccatattatcgaagcattagtacgttggatggcaccaattatgtcgttcactgcggatgagatttgggcacagttaccgggtgagcgtgcgaaatttgtgttcactcaagaatggtacacagatttatttggtttagaggcatctgaaaccttaaatgatgagtactgggcggagttattagccgttcgtagtgaagtcaataaggtgttagagcaagctcgtaccgataagcaactacgtggctctttagaagcggcagtaacactgtatgcggataaagccttagcggaaaaactgaatgcattaggaaacgaattgcgttttgttttacttacctctcaagcgaccgttgctgatattcatgatgcgccagaaaacgcgttagcatctgatatggcggggctgaaaattgtcttgagtaaagcgcaaggtgaaaaatgtccacgttgctggcactatgcaactgacattggtcaagtggcggaacacgctgatttatgtggtcgctgtgttactaacgtagccggtaacggtgaagaacgtaagtttgcttaattgatgaagaaaacactttgctctacaggtttacgctggctctggttggctattgctgtagtggtgttggacttaggtacaaaacagtatttcatgcagacattccgtctgtatgaatctgtggctgttatgccttttttcaacttcacttatgctcataactatggcgcagcttttagctttttagccgataaaggcggatggcaacgttggttttttgcattaatcgcactggcaatctgcattgtcttagtggtgatgatgtataaaaataaagcgagtactaagctaagtaatattgcttatgcgcttattataggcggagcattgggtaatctttctgatcgtctgatccatggatttgtcatcgattttctggacttttatgtcggtgattggcattggcctacttttaatattgctgatgtgtctatttgtcttggtgcaggtttaattatcattgagagctttttccctgataagaatgccagcccacaagaagccaacaagcagaagtaatctgacagatcagttaactaaaataacccctgcctaatggcgggggttacgcttaatagaaggtattagtatgagtatgcagatcctcaataatagtgcggtattgctgaatttcaccttaaaattggcagacggctctgttgctgaatctacacaagcacatggaaaaccagcgttatttcgtcttggtgatgaaagcttatcgcctgctttagaagcagagttggtaggacttaaagaaggggaaaagaaaaccttcacgcttgcgggggagcatatttttggtaaatataatcctgatcttattcaatactttatgccttctgattttgcgcaatccggtattcctgaaacaggtaccattatgctgtttacggcaatgaatggtaatgaaatgccaggcattgtgcaggaagtgacggaagattctgttactgtcgattttaatcatccattagcgttacaagatgtcacatttgatattgaagtcgtcagtattgatccacaggaggaaacaacaaatgcaaatattgctggctaacccacgaggcttttgtgcgggtgttgaccgagctatcagcattgttgaacgtgcattagaaatctatggcgcgccaatttatgtacgccacgaagtggttcataatcgctatgtagtcaatgatttacgcgaacgtggtgctatttttattgaagaaatctccgaagtgccggataacgctattttgatcttctcagcacacggtgtttctcaagctattcgccaagaggcacgctctcgtaatttaacgatgctttttgatgccacttgtcctttagtgaccaaagtacatatggaagtcgcaagggcgagccgtaaaggtaaagaggccattttaattggccatgccggacacccagaagttgaagggacgatggggcaatacaataacccagaagggggaatgtatttggttgaatcgccagatgatgtatggaaactaaaagtgaaagatgaagataatctttgctttatgacacaaaccacattatcagtcgatgatacttccgaagtgattgatgccttaaataagcgattccctaaaatcatcgggcctcgtaaagatgatatctgctatgcgacaaccaatcgtcaagaagctgctcgagagcttgcagagcgtgccgatgtcgtgtttgttgttggctctaaaaactcatctaactcaaatcgattagcagagcttgcacaacgtgcaggcaaaccctcttatttaatcgatagtgctgaagatattgatgaaatatgggtaagccatgccaatattgttggggtgacagcaggagcatcagcaccagatattttagttcaacaagtcttagcacgattaaaggcctttggtgcagaagaagtgattgagctatctggcagagaagaaaacattgtttttgaagtgccaaaagagttacgtcttgactataaagtagtcgaataataacaatagctataaacatttaatttaccaagcagagcctaggctctgctttttttatctccttttttataaatcgtaaaatttaatgaataatcatgcggttcatcgcttttgctgatgatctctatccttttgttcgtttttcttattatcgtcgttaaatgctggcatcaaacgaatgacatcgttaatctgtaaagtattaataaagatcataagtgttactaaggagaacatagattatgtctgcaacagaacttcgtcttgcggtagtgggggctggagggcgtatggggcgccagctgatccaagcgattaatcagcaacaaggtgtggtattaggtgctgcttttgaacgtactaattcttcattgataggggctgatgcaggagagttagcgggaattggtcatatcggtatcactgttactgataatttattagctcaagtcgggcaatttgatattttaatcgattttacgcgtccagagggtacgttgtctcatctggcattttgtgttgagcatcataaaggcatgattattggaactaccggttttgatgaagaaggtaaaaaagccattaattgtgcagcacaaactattcctattgtctttgctgctaactttagtgttggcgttaatttagtgcttaaattattagagaaggcagctaaagtgatgggatcttatagtgatattgaaattgtagaagctcaccatcgtcataaggttgatgcaccatctggtacggccttagcgatgggcgagtcgattgcagagactttaggtcgagatctgaaagattgtgcggtttatcaacgagttggacatacaggagaacgtgatcctcgcagtattggctttgcgactattcgtgcaggggatattgtgggtgaacacactgctatttttgcagatattggtgagcgagtagagattagccataaggcctcgagtcgaatgacctttgcaaatggcgcggttaagtcagctatttggctaagtgaaaaaaaatcgggtctttataatatgaaagatgtgctttctttagaagaattgtgattttattttatatttaatttattgaaaacccatgattatttatattatttgtgggtttttgttgttgtttatataatatttgtttgttgtttttgtttttttataacttcctttattttcttccatttttatagttaaaatttcgcttaagtctctttttttcttttctctatcatctttttaaaatatcttggtaagcaaacggttaaatttgtaagatgggtgatagaaattgtcatttagctgattaaattgctaatgattgatatttttttaattaaaagagtgttttttctagacatctgctcatgggatctttagaatgcgcccaatttgccaaaaatttgcccaaatttatgtttttggcattgatttagagtcttaaatctgaattaatatgcatgaaatgtgatttattattctctggagggcgttttgattaaatcagctatactggttctagaagatgggaccgaattccacggcaggtcgataggcgcagaaggcgctgctatcggtgaagtcgtttttaatacttccatgaccggttaccaagaaatattaaccgacccttcttactcccaacaaattgttactctcacctatcctcatattggcaataccggcgttaattcctcagatgaagaatcagcaactatccatgctcaagggttaattattcgcgatttacccctagtgatgagtaattatcgtgccgaagagagcttagccgattaccttaaacgtcatcagattgtggcgatagctgatattgatacacgtaaattgacgcgattattgagagaaaaaggcgcacaaaacggttgtattatcgcaggcactcatcttgatgctaaacaagcgcttgaaaaagcaaaagcgtttccaggattaaaaggaatggatttggcgaaaacggtgacagtggaacaaccttatcaatggacacaaggcagttggacattaaaaggagagttgcccgccactcaatcaccacaagatctccctttacatgtggtggcctatgattttggtgtgaaacgtaatattttacgtatgctggtggatagaggctgtcgagtaacagtggttccagcacaaacctcagcccaagaagtgttagcgctctcacctgatggcatttttctctctaatggtccgggggatccagagccctgtgattatgcaattgacgccatccaaactttcttaactaccgatattccagtatttggtatctgcttagggcaccaattattagccttggcgagtggtgcaaaaaccgtaaaaatgaaatttggtcatcatggtggcaaccatcccgttaaagatttagataataacagtgtgatgatcaccgcccaaaaccacggctttgctgttgatgaagcatcgttacctgattgtttaagagtgacacataaatcactatttgatggttctctacaaggtattcatcgcacagataaagctgcatttagtttccaaggtcacccagaagcgagtccagggccgcatgatgcggcgccgctttttgatcactttattgaacttattgagcaatatcgtcaaaacctgcaatcagtgacaaacaaataaatcaggagtgaaaaaaatggctaaaagaacagatattaaaacaatcctgattttaggtgcaggcccgattgtgattggtcaagcgtgtgaatttgattattcaggcgcacaagcgtgtaaggcattgcgcgaagagggatatcgtgttgttttggtaaattcaaatcctgctaccattatgacagatcctgaaatggcagatgccacttatattgagcctattcattggcaagtggtcagaaagattattgagaaagagcgccctgatgccatattaccgacaatgggcggacaaacggcattaaactgtgccttagaattagagcgtcaaggggtgttagctgaatttggcgtaacaatgataggtgcaacggctgatgctattgataaagcggaagatagacaacgctttgataaagcgatgaaaaaaattggtctggatacggctcgttcaggcatcgctcatactatggacgaagcatttgcagtggctgagcaagtgggtttcccttgtattattcgcccttcatttactatggggggaacgggaggcgggatcgcctataatcgtgaagaatttgaagaaatttgtactcgaggtttagatttatcaccgacaaatgaactattaattgatgaatcattaattggctggaaagagtatgaaatggaagtggtgcgcgataaaaatgataactgtattatcgtttgctccattgaaaactttgatgcgatggggatccataccggtgactctatcacggttgctccagcgcaaacgctaacagacaaagaatatcaaattatgcgtaatgcctcgatggcagtattacgcgagattggggttgaaactggtggctccaatgtgcaatttgccgttgatcctaaaacagggcgtttaattgttattgaaatgaatcctcgtgtttctcgctcatcagcattagcgtcaaaagcaacaggtttcccaattgcaaaagtcgcggccaaacttgcagtaggttataccctcgatgagttgatgaatgatatcactggaggaagaaccccagcctcttttgaaccttctattgattatgtagtgactaaaatccctcgctttaactttgaaaaatttgccggtaccaatgaccgtttaaccacgcaaatgaaatctgttggtgaggtgatggctattgggcgcactcaacaagagtcaatgcaaaaagcattacgcggactagaggttggtgcaactgggtttgatcctaaagtaaacctcgacgatcctgaagcgctcaccaaaattcgtcgtgaattaaaagaagccggatcggatcgcatttggtatatcgcggatgctttccgcgctggaatgtcggttgatggggtgtttaatctcaccaatatcgatcgttggttcttagtgcaaatagaagagattgttcgcctagaagagcaagtggcacaacttggtttagcaggtctaaatgctgatttcttgcgtcaattaaaacgtaaaggttttgctgatgcgcgcctagctaatatcttgaatgtgaaagagcaagccattcgccaattacgagaacaatatcaattacacccagtttataaacgggttgatacttgtgcggcagaatttgctacggataccgcttatatgtactccacttatgaagaagagtgtgagtcggatccaaatcaagacaaacctaaagtgatggtcttaggtggtggtccaaatcgtatcggtcaggggatagagtttgattattgttgtgttcatgccgctctagcattacgggaagatgggtatgaaaccattatggtcaattgtaatccagaaacggtttcaacggattatgatacctccgatagactttattttgagccagtcacccttgaagatgtattagaaatagtacggatcgaaaaaccacaaggcgtgattgtgcaatatggtggtcaaacgccattaaaattagcaagagctttagaagctgaaggggtgcctgttatcggtaccagtcctgatgcaatcgataaagcagaagacagagaacgtttccaaaaggccgtggataagttagggttaaaacaaccagaaaatgccacagtgacgacattagaagaagcggtagataaggcaaaatctattggttacccgctggtggtacgtccatcttatgtccttggtggacgagcaatggaaattgtttacgatgaaattgatttacgtcgttatttccaaacggcggtcagtgtttctaatgatgctcccgtactgttagaccgattcctagatgatgccattgaagtggatgttgatgcgatttgtgacggtcaacaagtggtgataggcggtattatggagcatatcgaacaagcgggtgttcactctggagactcagcttgctctctacctgcttatactttaagccaagatattcaagatataatgcgcaagcaagtacgtgaactcgcttttgaattaggcgttaaagggttgatgaacgtacagtttgcggtgaaaggtaatgatgtttatcttatcgaagtgaatcctcgtgccgcacgtacagtgccttttgtctctaaagcaaccggtgtgccattagcaaaagttgctgctcgagtgatgataggacaaagtcttgaacagcaaggcgttaccaaagaggtgatccctccttactactcggttaaagaggtggtacttccctttaataaattctcaggtgtcgaccctattttagggcctgaaatgcgatctaccggtgaagtgatgggggttggtgctacttttgcacaagcttttgctaaagcgatgttaggtagcaattccaccatgaagaaaaaaggaagagcgctactttcggttcgtgaaggtgataaaaaacgtgtcgttgatttagcaactaagctattgaaaaatggttttgagttagatgcaacacatggtactgccattgtcttgggggaagccggtatcaatcctcgcctagtgaataaagtgcatgaagggcgacctcatattcaagatagaattaaaaatggtgagtatgactatattgtcaatacgactgccggtcgccaagctattgaggattcaaaattgatccgccgtagtgcattacaatataaagttcactatgacaccacattaaatggcggatttgcgacaacactgtcattgagtgctgatcctactattgatgttatttcagtccaagagatgcatgcaaagataaaaaaatcttaattttttagttgttgttataacaatcccgaatgggtattaattacctattcgggatttttcttttttcgatgtaatagaaaaaagaaagccccacataacgacatgtagggcgagtgcaaaacaaagaggtgggtgcagatcttttttcaagaatggaggcaagaaaataaaataagtaaatttctttgttttagcggattgattttgtcttttttagatgtcagtgtcaacaagaatatttattagttattcatgtaacatgttgttttaatttgattaattttaaaaaatactaccagtaaggtatagaggtgagggaaaattctgctactatagcggtgggtgcttggatcgttttggttcaagcattgcgctagagccaaaaagacaaaagccccgaattttattttcataaaatccgaggcagtctcaaagctcaacaacttgattctgcctcctttattaaaaggagtcaatcaaattgacgaaaataaccttatttggcattacggttgtctgtgtgacggtacttatgtttgctttaattgtcggtgaacgattatgttcgcttaacattagtaacggaaacatggtcgttcaagctattttgatgtgtcatcaatagcttgatgggggaggtttcctccccccaatttttgttcaagttgtgagatatgtggtacaagcacccggtctttaaaaatatccccctatttggccatcccaatgaaattcttttttaagataactggatctgttacctatggttatatttgcttttaacgtaccatgaccagaatcattaattctacattcttcgtctaatgcgtagtgtgctgatgtcggcgatatttcagctatttttttagaatgctcgctaaatataatcttatctggataagttaatttctcattaatatgtccgatgagtttatccgatggatttaatgttacatcatataattccgtagtaatataaatgggataaagtaagtttttcggctcacctttaaatactaatcttggcgttaaaataagatgtgttgtagtggttgaccaaccattttgacaagatgaagcaagggcacctgtatctgtatagataaatttagaattataatcaagagagattattttatatgcgttattggcaggaaaatagtcaatattaattttatactttttaggatcgacgtaaggctgattattactatcaaaggttgtgacttctagtgttaattgttttggactggttagatattgtttcggtacctgaatttttaccgggtcatgtatattatgtttaggtgcatagttttgtctttcttctaaggcgatagaagtgccgttttcatcaaataactcgaagttaatcgctttaggtgtgtctgatgaagaccatttaacaataaactgatcgtctgaagtgtataaaggttgccaagttaaatcatccaaatgtgtatttgatttgctctctcccgcagatagaaactcaaatgagttaattgtgatgcgaggcgatgcttgtataatgacgttatagctttgctcatgatcttgaaaataattattatttttcacctcaagtgttaatgttgtttgcccaatattaaggtttttgataatcccatctggggtgatttcaactatgttaggttgactactataccaagttgcattcgcttcaacggggacatctggcgtagggctttgagccatcaataatttatctgcagcagaatcagttgttaatacaatataattctttttaaaataataacttagtgcagctttttcttgctgatagtctacagtttggctatcagctaggaatttatctgtagcatcactttgtattactatttttgtttttcctggtttaatggcggttaagttacctttactatcaatggtggctaccaaggtatcgctactagagaaatgaatgggggtatttttaacctctggattatcaaattccgctgttatttgatgggtaatgccatcattccagatcgattgtatggtgtgaggagaggttactttcagttttggtggcgctttttctatcactaaaggatagctatttttagctgatggatattgctcattacctaaggtttgtaaggtaataattgtagtaccagcctttttcatggagatttgcccacttgttgtatcaatggaagcaacagtaggatcagagcttgaccatattacctgcatattttgtggtacacctttataacttaacgcatcaatcacagttgatttgtagatttcctgttggataggtttctcaaaggtaatttcagatttagggatagccactttaatcgtcaatggctctgcgatagttattgtttcagcttgagcggttaagataatatcggacatcgtatttgctgtaacatttgtttgatattcaccattgcccactgactttaatggattgtcactaaaattaggcttaccactgatagttttaatctcaacattcttaccatcaatggtattaccgtatttatccattaattttacgcttaataacgtactatctttattatcagcatttatagaacgacgatgactattaaaggttgatttatgaatatctatttcagccggtattacagtaatatcttgtgttgatttataattattagaatcaagataagcgctcatcttcaagcgtcccgcgacatgactagtcactcgattcgttgctatccccttatcattagtataagtgctgtaatgataatcatctgctgatccgagtaatttccatgacacaataacattaggtaatacattattattggcatcaacgacagttgcttggtagttaacacctttatctcctgcggttatggttgttctatcaacctcaacagcgcgtattttccatgtcgtcacatcggcattaagttgtaatattttttgttttttgaaatgggtgccatttaccataacaccaatctgtgctgtgcccgattgagttcctgttatttcaatctcatagcgtcccggtgatatttgttgtgcttgactaaatttgatggttggatttttagaaaatccgcttacttgttggttggggatgatatttccatttttatctttaataacaaatgtcaataatgccttatctttgccattagcaatgatttgactcgggttcaacgacagttctgacatcgtttcatcaatgtgacccgttaaaaagtgaacatcatctgctatataagtacctgtttctaatattgcgctgactttggcaacaccgacagagcgtcgagataatccaactattgctacaccattatcatctgtaaaagttaatggtgtttcgagttgactaccttcattcgttgaccaagcgacaggtacacccataccgacaggattatcatggttatcaactaaataggctttataagtaatagactccccagcatgtggttgaatattgctaatagtaaagtttttcacctttgctgttgtgttattagggagcaccgttaaagaaacggattgttttattgctaatggagcaacgtgagccgataacgaggtttttccggtttttaatgcgctcacttgggcttgataaatgcctttttgtttctctttaaagggcgtaatcgttgtttgtaaattagtctgcggcgttaaggtgattttattggctaagttgggcaataaattaccttctttatcctttaaggttattgttacggtcgctttatttgcccctgcgacaatagtgtcagggaatatggcaacagtagaaagagaggccgaaatatcaccttccgtaaaggtgacaatgtgatcagcattgacagattgttggttattgagcactgccgttactttcgcttttcctgcctgagtacttgagagggtaatttcagctattccttgcttattggtcatgcttaatggtgctgcaagcttaccgagatcacttatccaaccgacagtaacgccttttgatactggattgttatgtttatcggtgatttgtgcttgaataatgactttgtctttaccattcgctgttacggtataaggtgccataaccttaacggagtggatcttgactgttttattatctgttaaaaatcctaaagattgcgttaccgtaatactatcaatagtggcggtaatttgactgagtcccgcttttgtacctctaatatgagcttgataattgccgttagccgtttctgtgattttactgaattggatggtgctgttatccccaattaacgcaatatcgttactacgacctattaccggattatcaaatttatcacgcaggtctattttacccacagcaaaggcattaccatcggcaatgatagattgtggttcaatcgtcaaataactattttgttgcactggcgctcccgcaacaaaggttacctgaatgctttttttctctttatttgataaataggcggtaattgttgttggctgtgctttggttcctgaaatgacaacttgcgttctgcctttttcatctgtttgagtagtagtttcatcaatatgattaatacttgattgccaatagacagggatatttttcaatgggttatgataagcatcagttaagtttgctactacggtaatgctatcttggttatctgctatggcagattgcttattatttaatgtcgttaatgtgagagtggcacttttgagatctgcaacggcaactaagttagtttgtgcatgttgaccattatttaatcgcgcggtgatggttgtgatacctgattgtgatgttgttagcgtatttttggcgataccttgagcatcggtcttagtttgttgctgagcaaattgagtaccagcactcccttgccaattaacaatagtatcaggaagttgattacccagtttatctgttactattgcagtaagttctgcgggatcttgcttatctgcaacaatctgatttttattaaccaataattcactaatcaaagcttgttgcccattagcaataaaagtaattggctcagcagtaaaggcattgttatttatacgcgcagttacccgcacactgagtgcttgtgtactggttaacttgttggtggtgatcccttgctcattagtcattgtggtatgttcaatgttaacaatacttttatcgtgctcagtttcccagctaatttgtgcatgagggagcggcttaccaaactgatcttgtactaatgcagtaaggaagaccggggtttgaccatctgcgacatgagttgtagaggatggggttatggagacaataacccccttagcttggttggcgataaattgggttgtcgcgtgagtcatcttgtcgtttattttggccctcacggtgaccgtaccggcgactttacttatcatagtggtggtcgccttaccttgctcgtctgtggttaatatggtttgttttaattgtgcttggttatctgccgataatgtcacatgagtagcgggtatcggattattttgcttatcaacaacttgtaatgaaatggttttttctgttttaccatcggctagagaaagtggtggtgtgatcgtgaagttttgttgtggaatataggcgctatcattatccacactaaaatggacttcagtcgaataggttatcccttttacttgtacaccaatctgcgaactccctacttgagtattagtcactgaagcaataatctcaccttgttcatccgtttttcttgagctaatgacattagcaccattactggcagtaaagttgactggataatgagccaatggattgtggttgctatcagtgactcgtactttgattttattttgacttttaccgtcggctggctcgttatcttttgtaaccgttaggttgccttttgcaatatgggcagtttgattatcggcaataagtgtcacggttgctgagttgaaggtattatcacggaatacgggggttagggttaatttttccggtatgcttcctgctgtaaccgttaattgatatttcccagcagctaaacgagagaaagtagaaatacggctattgcctttttctgtatcagactgttgctgtaaagtaatttctttactatcaatatcaacgggtaaattatcattatcaacgatggataatattaacttttgggttgcttcaccgttagcgaatagttggctctgtttaggtgaaaataggctattacgcgtattgattaacgatttatctacaataaccgttgtttgaacaggcgctgaacgattgccatgggtatcaatggcaacagcactaatgatatagctatttttctcaattgcaccaatttgatattgaggcaaaatcacggtgtagtgagttccaccatgatgttttatttgcccgccttgggcatttaacttacttgcggaccattcaatattggctaacggatattttgtttttacttgaacttgtaaatcgcgctcctctttagcataaccatttattgaatcaaccatagaaaggaaaactaaagtttcctttttatattctaaaatcatatcgttattacgattaacaaagtcataacgacttcctgctaatgtacgtattgctttgacattatcaggattaagttgtgaagcgagtgattctcctatgcggtaggacaagttgatattcaagttattatcagcacgatcatgtaagccaatacgacgctcggcatttaatgtgactaatggtatcggagtataattaatccctaatgtgtaggtatgtggatttttgtcccgtttatctttgccaaatagaccaacttctttaccgtagtattgttcaaagattaatttagtgcctaattgtggataagctggaaaatagccttctgttcgaatgtcccaaccattcgcagggcgttcactataatctaagatattattagaggctcgccaacttgatagacggtgataatggttagaacttaatttgaaatagtctcgccaaatttcggcgccaattcccaaacgattatgatgatgcgttaaatcatgatcataaaagccattaatgccgaccataaatttttcagtaaaatagcgataaccaataccataattaaattggctacgaagatctttgcgatgatagttagtttgagcaaagatcagcttttctttttgttcatataatggaattaacaattccgctgagctattttttaaggtgagatttttatctgctgaaagtgaaactcgcgcatgcccaaattgattaagccattgttctattttctgattggatttactggagatttggctaattgcatattgtgttacatcgatatctttattgagtaaaaatgaattatcaacaataattttagcgagctcttcgccctctgttgaggggattgcctcatcttgattattgagccactttttttttaataaatattcattaggaatattaagaatagttccatcatttatttttagctcacccgttaacgatacatgttgtggattagcttcaatcaatttaaataattttatattaaatttttttgcgatagattctggggtatcacccgctttgacttgataagtattttgttgatttatatcgctaatattatgttttttaaagttattctcattggcaaaagtctgcgtaggcatggttgtcacaataggaaatgctaattgtataaaaatattaagccaagcgacttttctcgtaatagaactggggcgtggggaaggtacattatttaacgtcgtcatttttaaactcatcgtaacaaataatgatgagattttcgtatttatagtttttttagatatcagaaactgaactttaagtaactaacttaacaatatataaaaaatagcagatgaaaattttaaatgtaaataaagatttaatttgacttagttagacatgcgctaatcatatattaaaaaacaataaatttactttgtcttattttaaagtgtaatgatataaaatatatatcattggtatagttaataaaaagccaatagcaagagtactattggcttacttatagagcgtgaaatactagatatcaacaaaagtatcaggatcaggccccaaccgctttcctttatctagttgttttatttcagcaacttcttctttttctaatttgaaatcaaagatatggaagttttcttcaatacgagaaggggtaactgatttaggaataacaaccaagccactatctaaatgccaacgtaacacaatttgtgccggtgttttttggtatttttctgccagtttctgaataattggttgatcaaacacgccttcaccaccttgtgctaaaggactccatgattctgtcacaatattatgggtggtattccaagctcttaatgaagcttgttgcatcaatgggtgaatttcaatctgattaatgacaggggaaacgcccgtttctgtaataatgcgctcaaggtgctcttctttaaaattacataccccaatacttttaaccagtccctctttttgtaacacaatcatctgcttccaagcgtcaaggtatagctcgcgagatggcactggccaatgcattaaatagagatcaacataatcaagttgtaatcgctcaaggctttcaagtaatgcaccacgagcatgggattgatcgttgttccataatttggtggtaataaataattcgtctcgaggaatagtgctttgctttaatgccttaccaacaccttcttcgttatgataaatagcggcggtatcaatcagacgataacctgtgtctaaagcatgatgtaccgctttaataacttgatcattatctgcttgccaaaccccaagtccaagttgtggaatagtgttgccatcagatagttggatcaatttaggattactcattatatacctccagttgcctttaagtacttagagtgctgccatatagatacgctggctgacttccaaggtgatatcctgatgttcaccgagtgcggtttgtccatgttgttgcagtttttgcactaaggcaggaatatccgcttcactgatattaaagtcagacagccgtgtttttagtcccatgcgttcaaagaacttacgagtctcattgatggcgctatcgattttaaatgcatcagagccttgatggatcccccacactttttgtgcatattggatcaacttagcgtatttctcctgacgtttttcgtttaatagcgcgggtaagacaatcgcgagggtttgtgcgtgatcaagcccgtgtaatgcagtaatttcatggcctaatgcatgggttgcccaatcttgcggtacaccgacaccaagaataccattaagtgcttgggatgctgtccacattatattagcacggatatcgtagtcttgtggtgaggtgagggctttcggtccttcttcgattaagatccttaataggccttctgcatattcatcttgtacaagcgcatttaccggataagtaagatattgctctaaaatatgaataaatgcgtcaacaacgccattagcggtttgtcttggtggtaaagaaaacgttgcagttggatctaaaatagcgcaatgaggataaacatgtgggctagcaaaactttgtttatccatcgtttgttttttactgatcacggaaaaacaattggtttcagagccagttgctggaagggttagtacacagcttaatggcagtgctttttcaattgcctgacctcggctagtgacaatctcccaaggctctccttgataaggtattgcagccgcaataaatttggttccatcaacaacagagcctcctcctacagccagtaaatgagtaataccgtgataacgagcgtaagcaacagctttcattagcgtttcatacgaaggattgggttcaataccgccaaactcatgaatttgataccctggtaaggccgcatgcacttgatcaagtatcccattgcgcttaatacttccaccgccataagttaataaaattctttcatttttcccaatttcagaacgtaattttgcaatttgtccttgaccaaaatgaattcgagtgggggagtaataagtgaaattttgcatggttgtttccaccttaattttatgttcttgatatgctgtagcatgacaaatcattaggaaaaattatttcactgtatatagacgggataatatgacatcactataacagcggggttatgaatgcgagtgttaaaccctttttttcataactatagttattaattgtagttaatttataaggagtagtatgaaaagtcattatttaacattaaaccaagctcattgggataaacaagccgcaatgcaaaatcaatggtctaaacccgtggacgataaagaaattatcgaggcaaaaaaaggaaactggaaagtacatttaacgccgaatcccgttaaaaaggagtggttagcagatattaaaggtaaaaatatactctgcttagcttcagctggtgggcaacaagcacctattttagctgctgctggtggtattgtgaccgtttttgatttatctgaagggcaactgagtaaagatagtcaattggcacaaaaacatcagttagctttaactactcaacaaggggatatggctgatttatcggtattttctgatgaaagttttgatattgtttttcatccaatttcaaatctttatgtacctgatgttaatcctgtttggcaagaatgttatcgtgtattgagaaaaaacggagttcttatggcgagtttttataaccctgtagtttttgttgatgacagaaatcaggcattgcgtgcacaaggattaatgagaccgacttatcgtttgccttatagtgatcaaaattcattaccttcagatattttgcaagaaaaaattgcaaagggagacggacttgtatttggtcattcgttgacagatttgattggtgggcaattaagagcaggttttttattacaagattttgttgaagattttgctcctcaggctcgttttttaattgatagttatattccaacatttcttgcttcgaaagccattaaaatataataaatcaattagttgaaatattaccattacaataataaatctgttttataaatatcttaataggataggagataagaaaatgaacaactgaacgtgtgtcacagcatcgaataatacataaaaaacgccattattttcactttaaataatggcgtttttggtgttactcgaaatggcttatttggcgctgttattgctacttttacgatgacgaatatacatcacaatagagccaattaaaccggcagttaatagtaatactggtaatgtcataagaatattcatcaccaatgtttcatgtttttgaataaaagggatcaggttcagtatataacctaatgagacaataagaccgacccataagaagccactaatccagttaaatagttgaaagcgacgttgttgtaattcagataaaccggccaaagttggtagtaatgtacgtacaaaaccgataaaacggccaattaatagtgcgtacaggcctcgacgatggaaaagatcattggctttatggtgatattgttcgggtaattgagccatccaacgtttgaccactttagtatcacttagccagcggccttgcagaaagccaagccagctaccaatactcgcggcagtacctaacacaataatggttggcaagaaatgtaaaacatctttggcaattaatgcaccacagagaattaataatgtatcgccgggtagaaatgcggcaggtagaaccccattttccagcataataataacaaaaagaacaatataaataatccacaaaatatttggatcagctagcaccatataatcatgttgcagtagcgcgtgaattatctcttttaatgtacccattcggcgaactcgcatcacaaaaaaactatatgagagctattctaacgtaaaaagaagatgatcgtttgatttaatccctgtgaaaccacagggatagcttttttttaataaaaaaagagatgaattagttagaaatacgtaaaaatgcttgctctagatcttcaattaaatcatcaatattttctaagccgatatgtactctaaataaggttcctgcgagagtgggctgagtgtcatattgtcgcatcgctttaatatcattgggatgatagcctaaaataagagattcaaatccaccccatgaaaaggccattttaaacagggataagttatcaagaaaacgtgaaaattcctcagtggtgaggatcttttttagactaaaagagaacaacccattacttccagtaaaatcacgttgaaaataggtgtgccccggacaagaagagagtgctggatggtagacattatccactagcgggtgctgttttaaccaacgcgcaatttctaatccactttgctcatgttgtttcattctaactgctaaggttcttaaaccacgagctgccatataagctgtatccggatctgcgcactggcctaataaatacgtgttttcacgtaattgtggccaacaacgttgattagcaacagcaaaacctaacataccatctgagtgaccaataatatatttggtcgctgattggatagaaatatcagcacctaaagtaagaggtttaagtaataaacctgctgcccacgtattatcaatcattataataatatttgggttatagtgtcttaccgcagtgataataccttgtaaatcttgcacttccatcgtaatagagccgggtgattctagaaaaacaatttttgtttcagggcgtaataattgactaatttcagtgccgattaagggatcaaaataggttgtggtgacagaaaatttacttaatatctgatcacaaaaattttgcgtgggatcgtaagcggaaccagtcacaaggatatgacaaccttgttcaataaacgcaagaatagattgagtaatagccgccgcacctgatggaaataatgcgcaaccggtcccttgttctagttcggttagtgcctcttgtagtgcaaaatgcgtggtagtacctcttcgcccataaaatagagctccttcagctcgtttttgggtggcttcacgtttttgggcaaccgtatcaaaaataaccgatgaagttcgctgtataatagggtttactgcgccttgtgaatatttttttgatcgaccacttaatagcagtgaggtttctggttttttttgcgtcatccgttatacctacttgttatgtaatgatgtgtttaccccaagttaatgcattttttactgaagtacaaaagaggatcgcgacagttgataaaatttcacgttatatgaaataacgaaaaattgtcttaaaaatcgacaaatgaaaaaaaaatggctaaatagtaatgataattactatcaaaatgcttcatgtttgatatcatctgagcgtttctctttttcctgatggcaacaggatgattgtaaataaacgattttgggtaagtagtgaaatagaaacttcattactgaatagataattagataagaaagagagtaaaaggccaactgatgcgtaatttgacagcttctattatattggcaatcggtctgacaggctctgcttttgcggatacgacaccggctaagcaaactgagcaacctgcgactacggccacttcttcaaccgcttctacacagggaacggcgactacaacgattgcaccaacagcagaaaatacggcaacgccaacgggggaagcagccaaaacggcaacttctgaaacaccagtggcagaagagaatacatcgacgagcacaggagatgctgcacagacagctctagagccagaaaatgccacgcaaggtgcgacacctgaaatcgtcactggagggggatttgctgaagatctctctgttatgggaatgtatcgcaatgcagatctcgtggtaaaaagtgtcatgatcggtttgctactcgcctctattgtcacttgggcgctgttctttgctaaaggtagctacttattagcattacgtcgtcgtttaagaaatgaaagtgcgcaattagtagaagcgaaatccctcaaagaggcattagcgattagccaaaaatttggcaataaaagtgcgacagccgatttttttaatgatgctgaattagagcgtacttactctcaagatagtcacgttgcatccggtattaaagagcgtgttgagatgcgcatggagcgtcgtgtcgcggctattattcgtgaattaggacgtggtaatggttatttagcgaccattggggcaatttctccttttatcggtttgtttggtacggtttgggggatcatgaatagttttattggtattgcgcattctcaaactaccaacttagcggtggttgcccccggtatcgcagaagcattattagcaaccgccatcggcttgattgcagctatccctgcggtcattatttacaatatttttgcacgtatgatttccggttatcgtggtgaaattggcgatattgcaacaggtgtagtgaccttagtcagtcgtgacttagatattgaaaacagcaaatcaaggtaatgaattatggcaatgaatcttggtaatgattcaggtgaagataatgaattgcatgatattaacgtcacaccttttattgatgtgatgttagtactgctgattatcttcatggtagcagcccccttagcgacggttgatattaaagtcaatttacctgcttcgagtgccaagcctcaacctcggccagaaaaacctgtttatttgacgattaaatcagataaacagatttttatcggtgaagagatggtaactcatgagacgatggccagtgtcttggattctatgacgcagtcgaataaagaaacgactatctttttccaagccgataaaacggtcgattatgaaactttaatgggggcaatggactcattaaggaaggcgggatacctcaaagtagggctagtggggatggaaaccgtatcatcgggtaactaattttttacttatattatacttaaaaatatcagcactctatcagtcatattgtaatgattaatagagtgcttttttattcactaaagatataaatatggttatctttttgtactatttatttttctagtatattaatagttgcgctaaaataaaatttagctttagtgttaaatgttattaatcgtctttagattaaattttgtatagtagtattaattaaattacttaagtgattatgtgctgaatcaattaataataagtagatactattattaaagttccaatagtatcaatattcgttaactattcatattttttcactttttatttgataaatatttttgttcttatggtaaatatgactataaccacatgattaataatgtttttattgctatttggtttaagtgtaaaaaaacttgcgcaaaaaattctattggatataatgcattccagttacaaattgaaacatgttgtaacctgtaacaacgcctaatttatttattatctaagtttccgttttggttacttactttttttattacaccaggtagatcgttgttttcagtcattcaattactgataagttgattttatttacttatctatactgcaacggatatttttgtcggttgtgagtaaaatataaagagaaaggcagagaactacacatagcatttttattattttaataaatttaaaagccatagtacttcgcggtactatggctttttgttttattacgcagcaaatgtgtgtttcatcttgtctagagcccgcttataccatcggttgttttctttctttctatctatctatctatgcaagtcctgctacaccaacaaattgttaacactcttcgcgaggcgtttttagattttgtgacacatttttctgctattgtgccaaaaacacattattactttgtctttgtcagtatcaagcatcaatttgctaccaatatttaacatcaaaattgagttagcgttatccaactagcaaaatcgcaatgttataaaataaccattagtaataatttcaaaataatattaattagctattgtggagtatttctgggagttaaccaccggttgttataatggattacttatctaacaagtcgtttttacgacactaaattgttattccaaaaacgaatatacttataactatatgaaaaattatgagaaaaacaggttgatcgctggttaaaatatagacggtttaagtattgattacgataaagtcatcaataaagatcgtaatgaagataactttgttgattaatcaatctagtaatgaaattagagatattaatgtaattatttattatttataaaatccagtttttaacaatttatataatgtaatacaaaggttgataatatgaaaataaccatcatatttataattaaaaaaatatattaagttatttataataatgtgggttgaaaattagaaataataaattattatttttgtattattttaaatatattgtcttataaattgattgttttttgtgttttctgtatctatttgattttaaatgatttgtattatttttaattagctcattttttgataataagaattattactacttattttatcattactatataaagaataattaattttaaattgaccatatatattaaaaatccatcttaaacattaaatagctgaaacgttttttctcgcataaaagaataatttattttttaatgaattatcgcttgataatgatcaagtcattattgtgtcggagtgttaaaaaggcggtgttttaaaattattccaattaaaaatcatcatatcaggagagatatatggccttggggaataatgttttttcccaacatggtattaaccgacgcgattttatgaaattgtgcgcagcgttatcagctaccatgggattaagcggcaaagcagccgcgcaaatgtcacaagcaatgacatcacctgaacgtccacctgttatttggattggtgctcaagagtgtacaggttgtacggaatctttattacgtgcgactcacccaacacttgaaaaccttgttctggatgttatcgcacttgaatatcacgaagtgctctcttccgcttttggttatcaagcagaagaaaacaaacataatgcgatggagaaatacaaaggtaaatacgtccttgttgtcgacggttctatccctgacaaagatggcggtatttactgtatggtggcaggcaaacctattcttgagcatatcaaagaagccgctgaaggtgcggcggcaattattgctatcggttcttgttctgcatggggtggtgtgccagcttctggaggtaaccctactggcgctaaatcactggaagctattttaccgggtaaaacagttatcaatattccagggtgtccaccaaacccacataacttcttagctacagttgcacatattattacctttaattcattacctaagttagatagcaaaaatagaccgctatttgcatatgagcgtctaatacatgaaaactgtgaacgccgtcctcattttgatgcgggtcgttttgctaaagaatttggtgatgaaggacaccgccaaggctggtgcttataccatttaggttgtaaaggacctgaaacttacggtaactgcccaacattagagttttgcgatattggtggaggaatttggcctgttggtattggtcacccttgctatggctgtaatgaagagggtgtcggatttacgaaaggtattttccaacttgcgaatgtttatcagccaacaccaaaagcacaagtacccgatgttaacgccaaagaaggtggtggtgtttcttatggtgcagcaggcttattaggtgcagttgttggtgctgttgctggggtaagtgtgatggctgtgcgtcaattaggccgtgacaaaaataccacaggagcctcacaggaggataaacggtgaataggcgtcatttctttaagctggcatcaggtggggttctccttgcgggaatggcacccactgcgagtcatgctgcggcgcagaaccgtcctccaattcctggggctctcggtatgctctatgactctacactctgtgtaggctgtcaagcatgtgtgacaaaatgtcaggaaattaatcatccggaacccatggagcgtggtgatacttatgctaatggtgatccgatctggtcaaacaatgacaaactaagtccttacacaaataacattattcaaatttggcgtgatggaacaggtgaaaataaagatcaactggaaaacggttatgcctttattaagaaacaatgtatgcattgcgttgatgctaactgtgtttctgtgtgtcctgtttcagcgttaaccaaagatccgaaaaccggtattgtgcattatcatgcagatatctgtacaggttgtcgttactgtatggtgggttgtccttataacattcctaaatacgattatgatgatcccttcggtaagctttataaatgtgaactatgtaaccaaaaaggggtagagcgcttagataaaggcttattacccggctgtgttgaggtttgtccaacaggtgctgtgatttttggtactcgtgaagagttgcttgaagaagcaaaacgccggttagcgaaaaaagcgggtgaagaatatcactatccacgccaaaccattaatggtggcgatacttatctacataagatcccagaatatcaagatcatatctatggtgagtttgaaggtggtggtacgcaggtgatggtactttccgcggtgccttttgaaaacctaggtatgccagaagtggctccattatcaacgggtgcgcgttctgaacatattcaacatacgctgtataaaggtatggttttaccaatagcagcgcttgcgggcattacttatttggttaaccgtaatagtaaaaaacaagagcaggaacaccataaggaggataacgatgtcgagtcatgatcctcgtccacttggcggtaagttatttactttagctgttagagtgtttttaccgcttgctgtgcttggttttattcttattggtaagcgtttggtattgggtcttggggatgtttccgatctaaatggcggttatccttggggtatttggatagcctttgacttacttatcggaacaggctttgcgtgtggtggttgggcactggcatgggctgtttatgtttgtaataaaggtgaatttcatcccttagtacgtcctgcattattagcgagcttgttcggctattcgttaggtggattatccattgcaatcgatattggtcgttactggaacatgcctcacttctttatgcctcaatactttaacgttaactccgtattgtttgaaacagcaacttgtatgaccatctacattatggtgatggcattagagtttttacctgcactactggaacgtttaggttggaaagtttcgttaagacgccttaataaagcgatgttctttattattggtctaggcgccttattgccaaccatgcaccaatcctccatgggatcattaatgatttcggcaggttggaaggtgcatcctctgtggcaatcttatgaaatgctaccgctgttctctttattaaccgcctttatcctcggtttcactattgttatttttgaaggttctttattaaaagcgagccgtactattaatgacgatgaaacaccgctatttaccaagttaactaaaatcatagaagtacttctgatcaccttcttggtattacgttggggtgaagtgatctggaacggtaagctgagttatatcgctaaaggggatatgttctcttggttattccttgcagaaagtgccttgttgtttattcctctggtattgatgcacctgaaaaataatcgtcgtagcccaagaatgttatttgtctgcgcattatttatgttagtgggtgcggcaatgtggcgtatgaactattcattagtcgcttataacccaggcaacggctatcactatttcccaactgcaagtgagttgttgatttctattggcttcgttgcattcgaagttactgcttacattcttattatccgtttactgccggtactaccagcacaaacagagtcaaatatacaattaaaaaaggctgaggttaaatcatgagccaacgcattactattgatcctattacccgtattgaagggcatttacgcgtcgactgtgaaatcgataacggaaaagtcgttaaagcttggtcttccggtactatgtggcgtggaatggaggagatcctaaaaggaagcgatcctcgtgatgcatggattattgtgcaacgcatttgtggtgtttgtacaacggttcacgcaatagcctcagtacgtgctgtagaagatgccttagggatggatattccggttaatgctcagtatatccgtaacttaattctggcttctcacattattcatgaccatatcgtccatttctatcagttgtctgcgatggattgggttgatattacggcagcattacaggcagatcctgaaaaagcctcagcgatgcttaaaggggtttctcaatggcaattgaactctgctgaagagttcagaaaagtgcagaagaaaattcaagatttggttgatagcggtcagttaggtattttcgctaatggttactggggtcactcagccatgaaattacctcctgaagtgaacttgattgcggtagcccactatctacaagcattggaatgccagcgcgatgcaaaccgcattgtggccgtgttagggggtaaaacaccgcatattcaaaacttagcagtgggcggtgttgctaacccaattaaccttgatgcaccgaatgttctcaatttagaacgtttaatgtatgtaaaacactttattgataacttgggtgattttattgaacaggtttataaagtggatactgctatttttgctgcttattatccagagtggttaaaaatcggtaaaggggctaattactacttatctgtgcctgaattgcctattaatggcaataatactgagtttttactctcaggtggctatatggaaggcgttgatttttctacttatcgtccaatcaaagattggaaagatcaaaacctgaaagacggcattgaagagagtggtaaacacgcatggtatgaagatgatgaaccattaaaaccatgggaaggtttaactcgtcctaaatacaccggttgggatgaaaataataaatactcatgggttaagtcacccacattttacggcaaacctgtagaagtaggtactttagcatggttagtgtgtggtttagcgggtaaacatgaaggcacagtaaaacactataacgaagttaatcagatctacaccaaattaaccggtcaaaccttggtgacagagcagttagagtcaacttggggacgcattattggtcgtaccgttcatgcttgtgtattacaagattcgcttaacttcttatggcaatcactggttgataatattggccgtggagatactgcttcctttattaaacctgagtttgagccgggtaaagagtatcgtggcgtcggttttgaagaggcttcgcgcggtatgctatctcactggatagtctttaaagatggcaaaatcacaaactatcaggcggttgttccttcaacatggaatgcgggtcctcgtaactttaatgatgaaccgggtccttatgagttatcactagtgggaacgccggtggctgatcctaacaaacctctggaagtggtaagaaccattcactctttcgacccatgtatggcttgtgctgtgcatatggttgatttaacaggtaaagaattaagtaaggtgaaggtattgtaatgcgtacacttgtcttaggtattggtaatttattactaagcgatgaaggcattggtgttcgtatcgtagaagcgctcgaagagcgcttctctttaccggagaacgtcgatgttattgatggtggcacatcaggcatggaaattttgcaagatattgctgcaagagatttattgattgttgctgatgcagtaagaagccagcacgagccgggcagtatctttgtattacatgatgatgatgtacctgcattatttacccagaaaatttcaccgcatcaactcgggctatcggatgtattaatggccttacgtatgactgatgaatttcctcgcaaactgattttagtgggtattgaacctgcttcattagcgccaagtatgtcattgtcagatattggtcagcaatcgatggaaatagcacttgaacaagtggttaatattttgcgtgaacatgggatcaccgtaacccctaaagaggtaacagcatgagtgaattaaattgggatatcacgggatacgatgaaccacctattgaattacttgaaagcagttttcgagagattgccaaaaaagagatgcaagcattgcctttttatagagaaaatattcccgtaaaagcgggaggatttactttatttgaaaagcaatggattggaacaattttaacgccttggatgctagagcttattgtgttgcccgggccatcacaagagtggccaagacgtaaaattggtgagcgtatcgccttagcgcttccttgtggtcaggttaaatttgtcgttggtgaacttgctaatggtgctcaatatctggcttgttcattaatgtcgccacttgatcgccatttacaaggtgagcaagcggttgagttggcagaaaacagtgcaaaaatggctctttctcttcctgttcagacacaatccgtcacagaagttgatttaagtcggcgttccctgtttcgtggtcagttaagatcataatgtagaacgtttacgcgacaccgagtcaaattcttcttattgaatagtcaggagtcagaatatgtgtagcacttgcggttgtggtgaaggtaatgtcagcattgaaggcgtagcgcctcattcacacgatcaccaccatcactctcacgaccatgatcatcacgaccatggccatcaccatcacggtcatcaccatcatcatgggcatcatcatgggcatgatcatcatcatgaacacaatgctactccagcgaatactgttcataaatatattgataagtctgagcaaaagcataagcacaattacgaaactcatggtcagcctatcattattcatcatcaccattaccataatagtggcgatgttcatctccatttttatcatgatgcacagcaaaatgaagcccaagtgttccatgagcatcatcatgggcatgacgatcatcatgcacattctcatgaacatactcatagccatgaacatgaacatagccatgatcacgaacatagccatgaacacgaagaacaatttagtccagttattgataatgacaacatgcattatgggcaaggggaagctggtactcatgctcccggaattagccaaaaacgaatgttaaaaattgagatggatgtactggataaaaataatcgaattgccgttcataatcgtgaacattttgcccagcaaaatgtattggcgctgaatttagtttcaagtcccggctccggtaaaacaacgttgctaactcaaacgttaaaacagctaacacaacgtgtaccttgtgcggtgattgaaggtgatcagcaaacgacgaatgatgctgatcgtattcgtgaaaccggggttgctgctattcaagtcaatacgggtaaaggttgtcaccttgatgcacaaatggtgcatgatgctacccatcaattaggtttaaaagacaacagtattctctttattgaaaatgttggcaatctggtttgccctgccagttttgatctgggtgaaaaacataaagtggctatcctttcggtaacggaaggggaagataaaccattaaaatatccgcatatgtttgccgctgcagatctgatgattatcaataaaattgatttagtgccacatcttaatattgatgtgcaagcgtgcattgaatcagcgcgtcgcgtcaatcctaatattgagatcattgcattatctgcgacaactggcgaaggtatggaagagtggttagcttggttggagagccgtttatgtgcttaggtgttcctgccaagatagttgaggtgggcgatgacgtccaccaactcgcttatgctgaagtcagtggcgtaaaacgtgccgtcaatatctctatggtttgtgagggtgacccgtcagagttattagataagtgggtgcttattcatgttggatttgccatgagtattcttgatgaacaagaagctcaagatactctggatgcattacaacatgtatatggtgttacccttgaagaggctgatgatgcaatacgttgatgaatttcgtgatcccgaattggccaaagcattattagctcaaatacgtgaaactatttcacaatggccccatcccatcactcgtccattacagattatggaagtgtgtggcggacatacgcatgccatttttaaatttggtctcgaccgcttattaccacaagagattgagtttgttcatggtcccggttgcccggtatgtgtgttacctatggggcgcattgatgcttgcttagaaattgcagcccgtccagaagtcattttctgtactttcggtgatgcgatgcgggtgcccggtcgtcatggttcaatgcttgatgctcgtcgtcgcggtagtgatatccgtattgtttactcaccgcttgattcattaaaaattgcgcaagataaccctgataaacaagtggtattttttggcttaggttttgaaactaccatgccaagtacggcgatgacactgcaacaagcgaaattacgtggactgaaaaatttttcgctattttgtcagcacattactatcgtaccgactttacgttgcttattagagcaagaagatgtacgtattgatggttttattgcccccggtcatgtcagtatggtgattggctgcacgccttatcaacctttatgtgatgaatttgaaaaaccctttgtggtgacaggttttgaaccgttggatttattacaagctatactgatggtagtaaaacagcttaaagcaaaagctgagaatgcagattatgttttaagtattgaaaatcaatatagtcgtattgtccctaatgaaggcaataaacttgcgcaaaaagcattgaaagatgtttttatgctaaaagagagcagtgaatggcgtggacttggggagatccctatgtctggtattcaactaacacccgcttatgctgagtttgacgctgaacgacgttttacaccagcaccacaacaagtggctgataatccacaatcacgctgtggcgatgtattaaccggacgatgcaaaccttctgattgcccattatttggtaaaagttgtacaccagaaacggcattaggtgccttaatggtgtcatcagaaggtgcatgtgcggcttattatcagtatcgccgtgaaggtaatatatgaaacaacctgatgaaatcaccttagctcaaggaaatggtgggcaaggtatgcaacaacttatcgaagggctatttttgaaagcattcgataatccattattgaatgaaaaagaagatcaggctcgtattgcattagccgatctcacagcacagggcgatcgtctggcatttagtaccgacagttatgtgattgatccgatcattttcccaggtggaaatattggtaaattatctgtttgcggaaccgcgaacgatctttctgtaggtggagctgtacctcgctatctctcttgtggttttattttagaagagggacttgcttttgaaacgctagaaacattggtgatggcgatggcaaaagccgcacaacaagcaggtattcagattgtaacgggggataccaaagtggttcctcgtggtgctgcggataagatcttcattaatactgcgggtattggggtgatcccaagtaaaattgattgggcagcaagtcacattaaagccggcgataagatcatcgtcagcggtacaataggcgatcatggtgccactatcttaaatttacgtgaaaatttaggattggaagctgatctgcaaagtgactgtgccgtgcttgaaccaatgatcgcgcctttacgtcaaattgacggtattcgtgcattacgtgatgcaactcgtggtggcgtgaccgctattttacatgagttttctcaagcctgtggctgtggcatgaatgtatatgaaaacaaactgccaatgaaacagtctgtacgtggtgtgtgtgaattattagggctggaagcactcaattttgctaacgaaggtaaaattgtattagtcgtgtcaccgcaagcagaaaaacaagttcttgaggctttgcatcaacatactttaggtcaagatgcttgtaccattggtgaagtaactgaagagcgttatattcgtttaacgggaatttttggcacaagtcgtattttagatctcccttataacgagccattaccccgtatttgttaattaaatcaaatcactcaactgatcttttaaatactcataagttatttctctgttacagaagtttgttataacgcaaacttctgtcatttatcttaattctgatcctttgataaaaatatttttggagtaacatgttcgaccaatcctactgcgtggagagggtctctcgtgggggtaagttctagggaaaaacatgtcttggtcagaatttaaatctcaatacctgatccgtttctggaagcctcttccggcggttattgcagcaggtatcttatctacttactactttggtttaaccggcactttctgggcagttactggtgagtttactcgctggggcggtcatgtgatgcaatggtttggtgcgcatccagaagaatggggttactttaaaatcattggtcttgaagggacaccactcactcgtattgatggggtaatgattattgggatgtttggtggttgtattatggcagcactttgggccaataatgtcaaacttcgtcatcctcagcataaagtgcgtattcttcaggccgttttgggcggtattattgccggatttggtgcacgtttagctatggggtgtaacctcgcggcattctttaccggtattcctcaattttcattgcatgcttggttctttgctgttgctactgctattggctcttattttggtgccaaactttcattaatgccactatttcgtataccggtaaaactgcaaaaagtcagtaaagcatcacctattacgcaagataaacaacgtgcaaaacgtcgctttcgattggggatggttatcttttttgccatgatcgcatggtcattaattattctatttgattcacccaaactcggctttgctatgctggggggaattggctttgggatcttaattgaacgtgcgcaaatctgttttacttccgcatttcgtgacttatggataaccggtagaacgcatatggcgaaagcgattattatcggtatggcagtaagtgcggtgggtatttttagctatgtacaattaggtgctgcaccgaaaattatgtgggccggtcctaatgcagttattggtggtttgttgtttggttttggtatcgtgcttgctggtggttgtgaaacaggctggatgtatcgtgcagttgaagggcagatccacttttggtgggtaggtttaggtaacgtgattggttcaacaatactggcgtactattgggatgatttttctgcggtactggctaccgactacgataaaatcaacctattagatacctttggtccagttggtggattagccatcacctacctgctacttggtctctcttttatattactactttggtgggaaaaacatttcttccgcaaaagagcgcaacaagcgcaagcgctttcaacacaaattaataaggaaatcgcatgaacgagaaaaaaaccatagtgccagattatcgtcttgatatggtcggtgagccttgtccttatcctgcggtggcaacattagaagcgatgccgtcactgaaaaaaggtgagatccttgaagtggtaagcgattgtcctcagtctattaataatattcccttagatgcgaaaaactacggttataccgtattagatattcagcaagatgggccgacaatacgctatttaattcaaaaatagcggcggaataattgataaaaaaacagcctgatcatagcgtgagataggctgtttttttgtactatgatatcgggtgataaaattactcggcttcaccaccaagtacttcgataaccctttcaattagcgcgcttagttcacctgtcattaagacaaaatcggcatcaaaacgctgggcaaaatcggctttatcaatatcatcgttttgctcacgcaaggtatcactaaatttaatgcgcttgatagagccatcatcacaaagcatgaattgcaggcgatcttcccaatcaagagaaagcttggtgacaaacttaccggcttcaatatgagtggcaatttcatcagagacaagctcttgtttcttacaacgtatcacgccaccttcttctaataccgctttaagctcggcttcatccattaatgtaaaaccagcagggagttcaccggaacgaacccattgtgtcatttttgattcgacagactcattaaaattgagtggaaccacgggtagcgaacctaatgttttacgcaataaggctaaattatcttcggcacgttttgcactacctgaatcaacaatcactaattgtttatctaaatctaaccaaataaaggtttgtgagaatttgctaaatgcgcgaggaagtaacgtgtggacaacttcatcttttaatgtcgctttttcggttttctttaatttacgaccttgttcaccctctaacttttcaactttatcttgtagcgcttgcttaatgacggtggcggggaggatcttatcttctttccgtgcgcacatcatgacttgtttacctgcaacatggataagtgcttcgccacgatcacccataggtgaaacccaacccgttttggtcatatcttggctactacaaggggtgaatgctaatgaagccagctgttgttctaactcatccattgacagcgctatctctttatttaagcgatagaccaaaatatttttaaaccacagcatctgacattccccttaatcatgattaacagcaatatgatactgaatgttagcagtatctaaaaggtaatatcctttaaaagaaatttattatcggctcacagtataaaaacagtgttcaagctgaatcgaataattagtaaaattactttatgaaaatgagttttattcttatttgttgctaattaacttatcgttttacgggagagataatctaaatctcaaggattgtcgtaatgtgataattatcacgtagttgggtttttatcctatttttgaacgctttctttgcaacactttcagatttatctctgcattaatttacaaaagaaaatttatcttgacgattggatgtgatttttatcacagttttaagaaaaagtaacaggttgtttttcatggtaacgatggtgatctaaatcacaaatataaatatttttttgcggaaaattgacaaaaacgcataaatagcctttttatgttaactatggttatagtttagctttagttatgattaatagaatccgtcgttcataaacaaacattgattagagattgtaattaaaccttactcttgtcctatcttggttgatatttttagttaattatccttataaagtgtgtaggtcattcattactgcgagttaaattgtagttaaatttatttttaagcttatttaaataacaagtaaatataaaaatagaaaattatagaattgagataataatatttaaatctttagggttatttatttagtggttaaaaataatacgtccttttaaatatattaaatagcaaggtaaatttttttattagcaaaaacattagctatgtaacaaaatgaaatataaaagaaaaattaaaaaatggtattttgaaaaagttgattaagttcaaaaaatacgtatctttaagcttaattgtgaagctcatcactcaggtatgtaaccatgaaaatatactttgatgtaattgtgggctatatcacgaaagttaggcttttttttgagtaacatgccagcgaaaattcaatgctctactcgattcgtggatagaaataaaagcaatgcccttatttaaatagtaatgaggacattatttttgtgtcttattggtgaatatctctgtgtcaaggaaattaaagcctgtaagaaaattaagtagagtaataatagcagttataaaaatgaacggttgtaaaagcgattttcttgtttgagatccgtggcggcggctctttgaactgaaatcagggttaatcatagacggcggtattatttttaaccttagaaagaaaatcataaaactatagaaaatagatgggtattttaatcatgaaaagcttaaagcctttagcagcgctggtaggtttattggttctgtcgggatctgcaaacgcagtaaatgtgtacaacgataaaggtacacgttttgatgttaacggtcagttccgtttaaaaacgcaagtgacaagtaaagatcatgaaatgcgtatgcgtgatgatggtagccgtatcggtttctttggttcccatgaactgactaacgatatcaaagtgtttggtaagttagagtggggttcagatactcaaaaaaccaacagtgataatgagaaaacaaactttgatctgtacaaccgcgtaggctatgtcggtttttctcatcgtgattatggacaaatccaatttggtcgtacttatatcccaattgactgggtaaaaaaatcaagctacggctatggtaatacaggggtattttactttagtgatgtattaggccgtgcagtaggttattcaagtaaaggggttggtaaaaacaactttatgacccgtttaccacaaactatctttattgaaacaaaccgttatgaaggctttaaattagcggcaactttaacgggtaaagatggtaaagataatgatggtgatggaaaaaatggcgatcgcagaaccggtgatatccgtcatgcctattctgtcgttggtttctataaatcaactttcggtttagagtttgatgcgggttactcagcagctgtaggtgagcctaatctatacccagatagtgttgttggtaataaaaaaccagaaaatagtatcttagcattcggtgctgaatacttcttccctggtcgcgaattctctatcggtatcgactatggtcaatctcgcggtaaaaatactggcttaaccttaagagaaggtgcaactgagaaagactataaatggaactcagttaaaggcgattggaaagcgaatttatatggtgttggtgtgaaatggcactgggatcgtatcgaaagtggtatgtatgcgggttattacctgcgtgatggcgatgctaacactttcaactacaaaaaagaaacctatactgtgggtgtagataaacgttttgcggtatctaaatacaacaacttacgtttattcgctgaaatggcatatgatgatgctcgtagcgaaaacccagcttatgaagataaaaaacaatatatctttgaaactggtatgcgtctgtacttctagttttatcaaagcaagtattgtttgacagaagtaataaaaggagagcaactgtgctctcctgttaaccaatatataaggggtgtgtaatggttaagaatgtgttgaaaatctcaacattagcaatgttggtcgcattcaatgtgaatgctgcgacagtcgatctccgtattatggagacttcggatgttcacagtaacttaatcgactttgactacttcaaagacaaaccaacagaacagtttggttatgttcgtacggcaaatttaattaaagccgcgaaagctgaagcaaccaatgcgattttagtggataacggtgacttgatccaaggtagtccactggctgactatcaagcagctaaaggcttagagaaaggggaagctcatccagcgcaccagttaatgaataccatggggtataccgtaggtaactttggtaatcatgaatttaactatggtttagattacctgaaaaaagccattgcgggcgctgaattcccatatatcaatgccaatatcatggatgcgaaaacaggcaaaaactatttcacaccttatatcattgttgatacaccagtaaaagatcgtgatggcaaagagcacactatcaagattggttatatcggctttgtaccaccacagattttaatctgggataaagccaatctggatggaaaagtcgttgtcaatgatattacagaaacagcgaaaaaattcgttcctcaaatgaaaaaagagggtgcggatctgattgtggctatccctcactctggtttctcttctgaaccttataaagctatggctgaaaactcagtctattatctgagtgaagttgatggcattaacgctattatgtttggtcatgctcacggcgtattcccaagtaaagaatttgaaggcattaaaggtgttgatgttgctaaaggcactgtaaatggtgttccagcagtaatgcctggccaatggggtgatcacttaggtgttgtcgatatggttatcaataacgacagcggcaaatgggtgatgacccaagcaacgggtgaagcgcgtcctatctttgataaagcaaacaaaaaagcattagttgaacgtgatgccgagttagcgcaaatcattgaaaaagcgcaccaaggtactcgtgatttcgtcggaaaacatattggtaaagcgtcagctaatatgtatagcttcttagctttagtacaaagtgatccaacggtacaaatcgttaacgatgcacaggttgattatactaaacactttattcaaggtgatccgaacttagacggcctgccagtattaggtgcagcagcaccatttaaagccggcggacgtaaaaatgcacctgcagacttcgttgaagtagaaaagggtgacttaacattccgtaacgcagcagacttatatctgtatccaaatacattagtggttgtaaaagcaaccggtgcagatgttgttgagtggttagaatgttcagcgggtatgtggaaccaagttgatcctaactcaactaaaccacaatacttaatcaactgggatggtttccgtacttataacttcgacactatcagtggcgtagagtataaagttgatttaactcagcctgctaaatatgacgttgattgccaagttgtcaataaagatgcaaaccgtatcaaaaatgtcacttaccaaggcaaacctatcgatcctaaagcaactttcttaattgcaaccaataactatcgtggatacggtggtaaatttgcgggtacaggtgaaagcaatatcgcctttgcatcaccagatgaaaaccgtgcaatcttagcttcttatattgctaagcaaacgaaagaaaatggcgaagttgcaacaaaagctgcgaataattggtctttcttaccgatcaagacagataaacaattagatgttcgctttgaaacttcaccaagtgaaaaagccgctaactttattaaagattttgctcagtatccaatgacctttgtggaaaatgacgatatcggttttgcaatttacaaaatcgacctaactgagaagaaataatcttatagacctgtccattcgggcaggtcgttctcatgttttggcgtgaaagagtgcagttattgctctttaaggggattttatgcgctttataaagctattacctgctattttagctgttattttagcgggttgtgtgacacaagcacctgaagttaaacaaccattaaaaccgcaagcaaaattagttgaaggcgtatcttgtattttacctgatgtacctactgccaattatgactatattgcgacaaatgatcgttatggtcaaaatagtaaagcatcaacagattactttaaattagccattaattactcaccggctttttgtgattataaaaaaaataatattaagcgtttaaataacgataacgaaaaagagcgtgctaaacgcgaattcgataaatttgaaatccagtgtttctcagataataaatttggctggattgttcatgggctatgggctgaaacctgcgatggtaaatcatgggatgaatgccgtgactggaaagacatacgcaagcatcctcgtttatgtaaaggggatttaccaccattagaatactcagcgattaaaccttacttatgttcatcaccgggtatcgacttattgcaaggtgaatgggaaaaacatggcgtttgtgcctttgatacgccagaagcattctttggtcagcaacaagcgttatttgacgcattagtgttaccagaaggccgcccttcaaatagtgaattgattaagttcttaaaagaaaataatccatcattgaaggataaagaaattcaaattaatcgagatgaattctatatttgttatagcaaagatttcgaagtgattgattgtccgaaacgtgaatattgatctagggataaaacttaaatgaaccataaatataaactcgtagcccttgcagtaagctccgtcttattagcaggttgtgctaaaaattatgacgaagcgaacgtcgttgatgtccgagtgattgcactcaatgacttccatggtgcattaaaagcaccaggtccaaacaagcctggtggtattgagcatatggctacgctggtcaaagagctgaaaaaagataacccaaataatattgtggtagctgccggtgatatggttggtgctagcccactgttatcttcaatgttccatgatgagccaactattgaagcgctgtcattagcaggtttagaagcaacttcagtgggtaaccacgaatttgataaaggtatgggtgagttactgcgtaagcaaaacggtggttgccatccagttacaggttgtcaaggtcctactgaatttaaaggtgctgatttccaatatttagcggctaacgtgactgttaacgaaacaggtaaaacgttattccctgaatatgtgattaaagagttcaatggtattccggttgcctttattggtttaactttagaaggtactgcggctatcgtgacaccaaaaggaactgaaggtttaagcttccacaatgaagcaaaaacaatcaacgctttagtgcctaagttacaagctcaaggtgtacaggcgattggtgttctgatccacgaaggtgctgcacagcgccgtgatggtggtccagtaaatatcaacgcatgtaatggtattacaggtaaagtacttggtgtggttgaacaattagatccagcggttgactttgttgtaacgggtcatactcaccaagcttataactgtactattaacggtagatcagtgacttctgcacaatctaatggcgccatgttaacgcgtatcgacctgaaattagataaaacaacgaaagatgttgttgatgtagaagcgcgtaatatttgggttgataaccgcaaatatgaaaaagatcctgctgtcactaaactgttagaagcttacgagaaaattgctacaccattagcgaaccgtattattggtaaactagaaggtaacttaaccaagcaaactaacgatgcgggcgaatcgggtctaggtcaagttattgctgatgcccatttatatacggcaaaaccaaaagatatgggtggcgcacaaatcgccttaatgaacagtggtggtattcgtgctgatatgacgggtggtgatgtttcttataacgctatttataccgtacaaccattctctaatgtactgttaacacaaacattaacgggtgagcagatcaaacgcttattagagcaacagtgggatcgttcacgtccacaagtattagcggtatcgggtaatttccaatatacatgggacagcaaagcacctgttggacaacgtgtgattgttgaatcaatgcgtattgatggtaagcctgtggatatgaaagcgaattaccgtgtagttgcaaatgaatacttagcaacaggtggtagtaacttctctgtactgaaagaaggtaaagatccggtttacagcgtgccagatgttgatgcagtagtgaaatactttgctgagcagtcacctattgctcaaccaaaagcgaacaacattactcgtaaataacatattttcatacgccttgtgaaaatagcacctcttacgagaggtgcgtaactaaataaagagagcaaagtgttgaacacaaagggtccatccctacctttgtattcattacgcactttgctctttttttatgtttttttactcatggggtgccaataagctggaactgtatttattacatataggctctcatgaaaatttttattgctccctttgttatttgtcgtgggcaaaaaaaagcccacagaggctgtgggcaaggaatgaaaataaaaagagggtatttggatcagatgtctatattaaagtctattatttgaagattttaaaacgagcgtcatcttcaatataatttttctcacttgcttcttgttcgatagagccaaagaccatttgtgctcttaatttccaatggcgaggaatatcccaagttgcgtgaacttcatcatcaataattggattgtagtgttgcagtgatgcccctacattttcagccgcaagggcagtccagacagaaagctgagccataccactggcttgctctgaccaaataggaaagttttcagcatacagtgggaactgctcttgaagccctttaacgatatcagtatcttcaaaataaaggatggagcctgcaccggcagcaaagctattaattttggcttctgttgcgctaaatgcatccgcagggactaattttttcagagtatctttaacgatattccatagtttctggtgttgttcaccaaataaaacaacaacacgagaagtttgtgagttaaatgcgctagggctttctttaaccgcttctttgatgatcgtagcaactctgtcttcgctaataggcagttgattacctaaatgataaattgttctacgttttttcattaattctgtgaatgcgttagacatgcttatctccttgataaatataagcgtttaaagctgtttagcctgagctaatctatgcacatactatagacgctgtgggtgatttattgatatctaaaaattttaaccacttacatcaaattattagagctagtctttaactgattgattttcattgctcttattaccatatctaaactcaggtgctagctgacttattcctaaaccccccgcttttttcacttttatttgtaccggaatacgctctttcatcgcttcaacatgactgatcacaccaataattttgccagaagcattaaggctatctaaggcatctaaagcaatatctagtgtatcaggatcgagggtgccaaagccttcatctaaaaagagtgactcaatttgcgtcttattactgactaaatcagataacgctaaggcaagggataagctgactaaaaaactctctccaccagaaagtgtacgtgtatcgcgtagagcatctgcttgccatgtatcggcaatctgtaattcaaggctacctgtcgttttgcgttgtaaaaagtaacgaccatgtagtttttctaagcgacgattagccagatagataagatggtcgagggttaacccttgggcaaagcgactaaatttatcaccagatgcagagccaactaactcatttaaataactccaatcatcataatgcgcttgctgtttggctatttgcgctaatagtgtttgttgctctatccgtttttcatcatcttggcgtaattgtatttgcagactaaatagtgtttcttgcaacgctttgtgttgctttgctaagtcgtctaaatggatattacattgctcagcagtacattgggttgagagtaatggttgttgtaataaatgttgttgataggctttttcttgagtctcaaggcgcgttttttcttgtaaaagtttatcaagtcgctgtttttgctgctcttgtagacgtgttctttcctctaccgataatagagaggctaaaaagtcattttcatcggcaaaaagactctcttttaacgcgtgttgatagtgttcagtggcttgttgtgcttgtgttattgctcgttgtagggctttttcattctcttgatattggccaattaattgattaagtcggttttcgagttggtttttttcttgagtatattgctcaatctgggtttgtaaaaattggctatgtttatcaagttcactacgtacctgctctacagattgtgaaccaaataaggcttgtcgttgatcctgccattgtgtttgttggtgctgttgttggcttaattttgctaatagcgcctcaagttcagcctgtttttctgctaaataacgttttttttcattttgcgtcacttgctgttcacgtaggctttgttgtaatagctgaagctcttttaactgactttgatattgctggtgctcttgttgacgagctgccaaccatggcgtgaactgctcaaattcagggagtgtatagccttgtttttcaatcgctgactgaatatgttgtgctaattgttgttgctgttggtgcaagtgctcgctttgttgctgataggttttgattgttttttgcaaataatctaaatcattttgctgttgcttaaccgattgttgttgttgattaaattgctcttttgcattgagaaaatgcgtattcttttgatgtgtttgggcttctaattgctgataactgtcaagtttttctgtgagaataagctcttgctgatttaatgattgttctaatgtcagtaagttatctgcatcatcaactaacggtaaatggtgtgcttgtgctaacgtctgccactgttgggtcagtacgctattctcttgggttaactgagcgatattgtcactcaaggtgctattttgtgagccatagtttaccagttgggttcgctgttcggctaaggtgatggtgagtgaatgcacctgctgttgtaatgcttctaaacgtagctttgtctcatctggtttgatgtcatgataggtttctacataaggatgctgtgttgagccacatagagggcaaggtttatctttcagtaaacgtgcacgctcttgctcatattcggcgactttttgtagcaaaagatagttgtcatttaaatctttaagatgttgtgctttctcttttagtgccagatcattttctgcaatcgtttgggttagagtcgctattttttgctgattttcactcaatgtagtttgataatgttgctgctctttgccattacgttgtaattgagtgtgtaaatttataatttttgccaatgcatttttttgcagattaatttgttgtaatcgcggttttatttcatcgggtttgtctgctttttgacgcgcttccaattgtgtttgataagattgtagttgctgttgctgtaaattaagttgctcttgttgggtggctaatgtttgggtagcttgttgtaatgctttttccaaacttatgactttttcctgctctgctgtttctcgtttttggttggcaagatattggtttgatatttcattatattgctgaaaatagtgttgccataagggtagattttccgcaagttgtgcatgataggcgtgttgtgttaagtcgttatttaattgattaacttgttgttgtgtggtgattaattttttctcggctaactgagaatgttgcagatattcagcgcatattttttctaatttatgcttgtgttggttattagtactaatttcttgttgtaacagcaccaattgattatctaaaggcagtaccttctcacgaattaactgtaaagtgtgctgttttttctcatgatgcgtttttaattgttcatgaaaggctgccaattttttattgataggtaggctttgttgttcaatagcctgtttttctgtttttaagcttgttaactgtgttgctaaatagttttgctctgtaagacgacgatttttttcatcataaagagggcgaattttttctgctggctcatttttttctaagcgttgaatatcgggttgagcaataattaatgcctgttgagcctcatagagtcccgcttgggctgattgttgttgttgctgaatttctagcgctttttcttgccattgcttagcaacttggtattcctgttgctctttttgtaaccttgttatttgtgtttgaatattggcttgttgtgttaatagctcttggcgtgttgttgcatccaataatgccatcatttgagcttgttgttttagcgtgtttaaagcctgctcttcttcgcgccaatgtttaaaaattgtttgtgaaatatggcgatagatatctgtaccagtaagctcttcaagtagctctgcacgagatttgtcatcagcgttgagaaatgcagcaaattgcccttgtgataacaacatggatttagtgaagcgatcgaaatctaatccggtgatcgagattattttttcttttacttggctaattttattggctaaaactttatcttcaccgcctaaacgattaatttttgctaactcagcctgtggggcttgtaagtttccctcttctttataattcgcacgacgttgttcccaaaatgcccgataggcaacccctttaacttcaaattccacttcagctaaacattctgcagtgtgacgagtcattaattcattttgagattgggttactttatctaagcgtggcgttctgtgatataacgctaaactaattgcatctaagagcgtggttttacccgcacctgtcgggcctgtaatggcaaatagtccattgctaacaaaaggctcttgatcaaagttaattttccattcgcctttgagtgagttaatgtttttaaagcgcagacttaagattttcatcgtgcgttgttatcctcttgctctgccatttcaaccgcttgcttaaagagtgtggttaaccgtattttgtcttcctcggtttcaaactggtgttgagctaagcgcctttcaaatacatcatatacagtcagttcagttagggtttctttctcattttgcatcagtgcttgacgttgttttctcgctcttcttaatacgatcacttcaaagagtggcgattgagttagctcttgaatacgggtttgaatatcactgagataatcttgagttgaaacttcaatatctagccaaatcgtggtatccatttcattatattgtgttgctaacttttcgagttgtgtggcaatttcttgtaacgagcctgaaagagtgcgtaatagctgaaactcagggatgggtaatagtgtcatttccgctaacttatcttgctcaaaatcgataagacaaacacttttctgttgtgcactttcatcaaaacttaatggaataggtgaaccactgtagcgaatatgacccgatttattgacgcgctgtgggcgatgaatatgaccaagggcgatatagtcaaatggaggaaatagggttgcgttaaaggcttctaatgtgccgatataaatttcacgtaccgaatcgctaacactggcgccaatcgttgtcagatgccctgtggcaatgatagggatgttaacattgagttgttttcgtaagtcgagcgcggcttgatattggcgttgataataatctgcgatcgcttcttttaaagcgccctgtttgtctgctcccgattgcccacttttgctatttatcatatctctagggcgtaaataggggattgcacaaagtaatgctccaggtgtgtgatttttttgataaagaataataggggcttgtggggtttcagtgtgaacattagcaatgacggtggtatttaaacacgctaacagtgatttagattcatttagcgttgccacagaatcatgattaccccctaaaataatcagttggcactgagtatctcttattgcgacgacaaatcgattataaagctctcgggcataactggggggggagccagtatcaaagatatcccctgcaacaataactgcatcaacttgttgttcacggatttgcgctaatagccaatcgagaaattgttggtgctcttgggcgcgagtttttgtaaaaaaatattgtcctaaatgccaatctgaggtgtgaataatccgcattgctatcccttaatgttaactgccgtcagtatagcgcaccttacttttttagtgaaaatccacctatgagctacgtattttgagtgaaatcacaccaattttagccttatttaccttaacaatgacactgtattccagtattgtcatagtcagtcataaatctgtcataaaagtgcctcataatcattatgaccctctatataaataacacaggatagagtatggcaaggcgtattcttgttgttgaagatgaaaccgcaattcgagagatgatctgttttgtattagagcaaaatggttttcagcctattgaagctgaggactatgatactgcattgagttttctgattgacccttaccctgatctggttttattagattggatgatccccggaggctcgggtatccaagtgattaaacagatgaagcgtgaaaataatacccgtgatattcctattattatgctaacagcaaaaggggaagaagaagataaagtcaaaggtctcgaaacaggcgcagatgactatgtgattaaacctttttcgcctaaagagctggtggctcgggtaaaggctattttacgacgattgtcaccgatgtcggcagaagatgtgattgaatttaatggattaagtcttgatcctgtttcacatcgagttaccagtcaagataaacccattgatatggggcctaccgaatttaaacttctccacttttttatgacccatcccgaacgtgtatatagccgagagcagttgctaaactatgtttggggcaccaatgtttatgtcgaagatcgtactgtcgatgtacatattcgtcgattgcgtaaagctatagagcaagatggccatgaccgaatgatacaaacggtacgaggaacgggatatcgtttctctgctcgattttgagttgataagggagtaattaactggtgttagaacgactctcatggaaagccctcgtgtgggggctatttctattttgtttacctgcctttgtattatcactatttatcggccaccttccttggttgctcgtggtctcattactgagtgccttgatatggcacgcctataatttaatgaaattatctaaatggttatggctcgatagatcagtattacccccagaagggaaagggggctgggagcctattttttatggtatacgacaaacacagcaacgtaaccgtaaacgccgtcgagaattaggtgatttaattaagcgttttcgtagcggggcggagagcctaccagatgccgttgtgatgatcactaatgaaggaaatatcttttggtgtaatagtcttgctcagcatcttctaggctttcgttggcctgatgataatggacaaaatatttttaatttattgcgctatcccgattttttacattatttcaccgtcgccgattttagccgccctttaactattgcattaaataatggtgctattgttgaatttcgggtgatgccttatgcggatgatcaacgtttaatggttgctcgcgatgtgaccgagaagaataagttagaaaattcgcgacgtgatttttttgctaatgtgagccatgaattaagaacacctttaacggttattcaaggctatcttgagatgatggaagagaataccgcagaaaacccggctgaacataaagtgattaagaccatgcaagagcaagcaaagcgtatggacttattagtacaacaactgttacagctttcacgtattgaatctgcgcctcatattgatttgaacacggttgtcgatatgcctgcgctattaagcgtgcttgagcatgacgcgcactcattaagccaagaacaacaaaatatcatctttgatattgaccataaatgggctgttcgtggtaatgaagagcaattgcgtagtgccgtatctaaccttgtctataacgccataaatcatacccctgagggtacgactattcgcgtgagttggaaaaaagtaccacaaggtatgttgtttagtgtgtcagataatgggccgggtatcagtgctgaacatttaacgcgcttaaccgaacgtttttatcgtgtagataaagcgcgctcccgccacacaggtggtacagggcttggattggcgattgtcaaaaagtccttacaacatcatcactcaatactgaatattgaaagtaaagtcggtgtaggaagcactttttcttttatcatgccgcaaacattgttaacagaaaaaaaataatttcgtttttatccttattttattagtacctttattacctatttttaaaagaggtgataaaggtatttttgtcatatacccatcaaatcaatatcaataaaatctaatatcgtagcgttaaattttaatattattaattaatgggaactttaattgatggctagattgctgtttggtgagtaaaaaatatacaaatcatatcggggataattggcgatatataacagttatcactggcctgaaaaaatactttagatgattattctgctttttagatcagctattgccttttttcattataaaagttttacttgtgagcagttatcggcgcttttttctatttaatatgtaattgctctgtgtaaaatggttattcttaaatattattctgaataacccatcatgaagcaaaatagatactgctgatatttttgttgtatttactttatatagtaaatgtaaattaaccatctaataacgatatattaacaaatcttatggcacatcgattaacttccagagacattctggcattaggttttatgacttttgctctatttgttggagcagggaatattatttttcccccgatggtggggttgcaatcaggggagtttgtttggactgcggccattggttttttgctaaccggagttggcttacctgtgctaacagtggtggcattagcgaaagtgggagggggaattgaagcattaagcacccccattggtaaatctatgggacttttattagcaatagtcgcttatcttgctgtcggccctttatttgccaccccgcgaaccgcaacggtctcttttaaagttggcattgcccctttagtgggtgatagtgatattgccttacttatttatagtgttatttactttttaattgttatcggtatttcactgtatccgggaaaattacttgatagtgttggtcacattctggcaccgattaaaattttagccttagctgtattaggtttagctgcgctattttggccagcaggaacgccgatccccgctacacaagcgtatcaagatatggcatttacccaaggttttattaatggctatcttaccatggatacgttaggcgcgatggtctttggtattgttattgtcaatgcggcccgctcaagagggattgataattcgtctttattaacacgttatactatgtgggcgggaattatcgcgggggtgttattaacggcgatttatcttagtttatttaagcttggttctgctagcggcagcattattccagaagcaaaagatggcgcagatattttacatgcttatgtgcaacatactttcggtaattttggtagtttctttttagctctgcttattttcttagcttgtatggtgacagcggtaggtttaacttgtgcttgtgcggagttttttagccgctatttgcctatttcttatcgtacattagtattgattttggctgtattttccgcggtagtctctaatcttggtttaagtaaactgattgcgttctctattcctgttctggtgatgatttatcctccttgtattgtgattattctgatgagtttcactttacgtttttggcataatccaagccgtattattgcccctgcaatggcaataagcttattttttggcatttttgatgccattaaagcgtccgatcatttaaaacatttattaccggattgggcggctaaattaccattaagtgagcaaggattagcgtggttaattcctgtattagtgactattgttatatgcgctatttacgataaagtagctggctcacaacataaaaaagtgatccactctgggataaacaaataagctaaaatacattaaattaaaatctaaaagggaaacggaagtttcccttttttacgaaattaaagtaagtgttgattttcttttaggcgattagtaagcgttttatcaatatcagcacgaacggaatttgaaacgtcatactctttagctaacgatgagaattgactaataatatcaacagtatgatggatatacgtttgtgcttgttgccaactttcaaaaccagctatttctgcaagatgtttgattatgtttaatggtggttgttttccatatccaccgaatgatgtgatatgttcattccttggattgggattataagtgacatcataaaaaggtgcaggctcccaatgtccatcgtcatactgtagaaaagaccaatttttactatgatcatcttgattagaagcgaataaattaaaaatagctcgcctaaactgaagctgcccggctgaaattgatttacataatacacgatttactttgatcaaatcttcgtaatctaatgaaggtaatctaaagtcagcatctaataagccacatgcactgtgcatgattaaacagcctgatttacccgaactatttgtgacacgatcaaaacgttttagggctaaccaagatttgccgtgactgcttttaggtacatcaataagtttccattgtggaggattaagatctaatttgcttgctagagtgagatagattgcttcacataaaccttcatcatgaccaagaggtaagttctgggacgtaaatttgatcaaccatgattcatcgccttgttcttcatatgttttgcattggttaaaatcgccctgtttaaaatagagcaatgctttaggtctcgcgcctccggagctaccaacaatagcaagttcagataaaacagtttctgtttgcccatcaaataccgcttgagcatctaagcctaaattaatcaaatcaacatcaaaatgttcatttgtttgatagtcagagaggggtaagtaagacaatccactcatacctttattaccaacaaaagctaatctgtccattgttgtaatttcatgtggttgtataccgtgttggcgaaaaattctatcttgtaataatcgaccccatccatcaggtagactatcagagaaaagcccatgcaagttaccatgaggttttttaggtgcaatttgtaaatctgtattatttttcagattaaaaggagaactattgccaaattgtgttaaatagtgagcatcgtattgaaaaaatacaccattatgattttgagctaatgttcccatcaaaacttgaacacctgtagacaacgtccgggttacatttaatttttttattggcttaaaattcatcttgtaatacctcttcaatggttcttggtatacgaggcttattggcttttttagggtcaacaacggcataaaggttatttaaatcatcaagacactgccaaagtaacagtagttgtcgtaatgaaattttgccttgtaactcaaattttttaattgttgatgcagggacggtactgcgctcggcaagatgttcccgagaccatttttctttttctcgtcgttttcgtaaatgagtagcaaaagctcgactaacatcaatatcggtaagtaatgagagtttcattattagctctaaacataaaatggatactataatgtccaattatagcatgatatggcataattggatattatagtgtccatttttacaagctaacttctgtgaggatttttactaattataagcattcagtaaaattattcattgcaacggggtgttgtttttcatctaaatagtagtaagtactcaccacaatattatcttcacctacaaaagttatattaaacttagttttaacttaatagcacaaagtggaaaaataaattttatcccgcttaattcgatgtgtacctttgtagggaaaactggaacttaatctataacaatgagtatacaactaccagaacaccataagcgtaaacaggtcattccgtaccttccttatcaattttacgcatggtgttttttctcctgatcaagctttgccagaatctgttcgacctgttgctcaaaatcagcaggaagtgggtttttaccaaaagataaaaagggcttacgggcttggtaatcaaccgatgaaacggcatctcgaccttgttgcatataggcattaaggaaagtgataaaacggtggttttcactgtcagtactggttaggaaactggagtaatgggatacattggggcgatagaggatcgtttttaattggcctgttttttcattaatgccatatagtttaattgccaacatattgcccgcataaccaaattgcgcctctttatagcgggttaaacgtacttttcccatgccatagctatacagtattcctctttgcctatcagcaataaggtatacaggaggcgtaaagaaagagagatagccaaatagccataaaaaaccggggaaaaaaattagccagccaatgacgaggtatttatcatattggctatcaataaaaaattcaccggagttatacgcttttatatactcccaccagctaattttttctgtttcccaaaaaggttgatattttaaaatagatttacgctcaatctcatttaatgcgttaatatctttattattttcaaataaatattgagacatgctttctagctcagctttggctccaatatgcccttccataaaattaaataatgtataacaagccataactaaaagaacgataaaaaagggtattgtattggtgagttggctattgcgctgtggtgagttaatcacacaacgctgttgattaactgcctttaaaaataccagtttttgaggtgctaaaggatcatcatagtgatgactttccgcaactaatggtgtggtttctaattgctctgggtgctttgatacagtgcgtaaattggtcattctgtaccttccttatcaattttacgcatggtttttttctcctgatcaagctttgccagaatctgttcgacctgttgctcaaaatcagctggaggtgggtttttgccaaaagataaaaagggcttacgggcgtggtaatcaacaggcgaaactgcatctcgaccttgttgcatataggcattaaggaaagtgataaaacggtggttttcactgtcggtactggttagaaaactggagtagtgggacacattggggcgatagaggatcgtttttaattggcctgttttttcattaatggcatatagtttaattgccaacatgttgcccgcataaccaaattgcgcctctttatagcgggttaaacgcacttttcccatgccatagctatacagtattcctctttgcctatccgcaataagatatacaggaggcgtaaagaaagagagatagccaaatagccataaaaaaccggggaaaaaaattagccagccaattattaaaaatatttctgcttggctattacggctaagctcaccggtataatatgccttaatatagacccatatacttattttccctttgttaaagtatggaacatatttatctaaatattttggagggcttttgccttgttcattatatgagtcataaattcttttgttataattaattgtatcctgaaatgtatacattttagatgagtgcctatccataaaaccccaaaatgtataacaggccataactaaaagtacgataaaaaagggtattgtattagtaagttggctattgcgctgtggtgagttaatcacacaacgctgttgattaactgcctctaaaaacactagtttttgaggtgctaaaggatcatcgtagtgatgactttccgcaattaatggtgtggtttctaattgctctgggtgttttgatacagtgcgtaaattggtcattctgtaccttccttatcaattttacgcatggtttttttctcctgatcaagctttgccagaatctgttcgacctgttgctcaaaatcagctggaggtgggtttttgccaaaagataaaaagggcttacgggcgtggtaatcaacaggcgaaacggcatctcgaccttgttgcatataggcattaaggaaagtgataaaacggtggttttcactgtcagtactggttaggaaactggagtaatgggatacattgaggcgatagaggatcgtttttaattggcctgttttttcattaatgctatatagtttaattgccaacatattgcccgcataaccaaattgcgcctctttatagcggattaaacgcactttccccatgccatagctatacagtattcctctttgcctatcagcaataagatatacaggaggcgtaaagaaagagagatagccaaatagctataaaaaaccggggaaaaaaattagccagccgataatcatcaatatcttaaacttatcatttctgtaaattttatccgtatagtaatcgattaaatatgttccgatacttatttccttaactttcatatatggcaaatagtttgataaccctattggtaagttatcaacaccatatttttcattaaaatagttagagttatcttgaagggtaaaataatttgatttatggttttcaataaaaccatacagtgtataaacggccataactaacagtatgataaaaaaaggtattgtattagtaagttggctattgcgctgtggtgagttaatcacacaactctgttgattaactgcctctaaaaacaccagtttttgaggctccaaagggtcatcatagtgatgactttccgcaattaatggtgtggtttctaattgctctgggtgttttgatactgtgcgtaaattggtcattccgtgccttccttatcaattttacgcatgttttttttctcctgatcaagctttgccagaatctgtttgacctgttgctcaaaatcagcaggaagtgggtttttaccaaaagataaaaagggcttacgggcttggtaatcaacaggcgaaacagcatctcggccttgttgcatataggcattaagaaaagtgataaaacggtggttttcactgtcggtactggttaggaaactggagtagtgggacacattggggcgatagaggatcgtttttaattggcctgttttttcattaatgccatatagtttaattgccaacatattgcccgcataaccaaattgcgcctctttatagcgggttaaacgtacttttcccatgccatagctatacagtattcctctttgcctatcagcaataaggtacacaggaggcgtaaagaaagagagatagccaaatagccataaaaaaccggggaaaaaaattagccagccgataatcatcaatatcttaaatttatcatttttgtaaattttatccgtatagtaatcgattaaatatgttccgatacttatttccttaactttcatatatggcaaatatcgagataattcttttggtaagttatcgataccatatttttcattataatagttagacctatattgaagggtaaaataatttgatttatggttttcaataaaaccaaacagtgtataaaaagccataactaaaagtacgataaaaaaaggtattgtattagtgagttggctattgcgctgtggtgagttaatcacacaacgctgttgattgaccgcctctaaaaataccagtttttgaggtgctaaaggatcatcgtagtgatgactttccgcaactaatggtgtggtttctaattgctctgggtgttttgatactgtgcgtaaattggtcattctgtaccttccttatcaattttacgcatggtttttttctcctgatcaagctttgccagaatctgtttgacctgttgctcaaaatcagcaggaagtgggtttttaccaaaagataaaaagggcttacgggcttggtaatcaacaggcgaaacggcatctcggccttgttgcatataggcattaaggaaagtgataaaacggtggttttcactgtcagtactggttaggaaactggagtagtgggacacattggggcgatagaggatcgtttttaattggcctgttttttcattaatgccatatagtttaattgccaacatgttgcccgcataaccaaattgcgcctctttatagcgggttaaacgcactttccccatgccatagctatacagtattcctctttgcctatcagcaataaggtacacaggaggtgtaaagaaagagagatagccaaatagccataaaaaaccggggaaaaaaattagccagcctaggataagatatttgtcatattggccatctataacaaaattacctgaatcataagcctttatatactcccataaactaattttatcttttccaaaataaggtttatacaattcaattaattttgctgatagcatattttgttcttttttatggccatatttttcctctacatgtttggccattatttcaatggaatttttagtagcaatatgattatcaacaaatccgaacaacgtataaaaggccataactaaaagtacgataaaaaaaggtattgtattagtgagttggctattgcgctgtggtgagttaatcacacaacgctgttgattaactgcctctaaaaatattagtttttgaggtgctaaagggtcatcatagtgatgactttccgcaattaatggtgtggtttctaattgctccgggtgttttgatactgtgcgtaaacgggtcattctgtaccttccttatcaattttacgcatggtgttttttctcctgatcaagctttgccagaatctgttcgacctgttgctcaaaatcagcaggaagtggatttttgccaaaagataaaaagggcttacgggcttggtaatcaacaggcgaaacggcatctcgaccttgttgcatataggcattaaggaaagtgataaaacggtggttttcactgtcggtactggttaggaaactggagtagtgggacacattggggcgatagaggatcgtttttaattggcctgttttttcattaatgctatatagtttaattgccaacatattgcccgcataaccaaattgcgcctctttatagcgggttaaacgcactttccccatgccatagctatacagtattcctctttgcctatcagcagtaaggtacacaggaggcgtaaagaaagagagatagccaaatagccataaaaaaccggggaaaaaaattagccagccaatgacgaggtacttttcatattggccatcagtaaaaaattcacctgaattataagcctttatataatcccaataatttatattttttttcccaaaatatggtctgtacgtgtttacatattttaatgtaggcgcatctaaattaagttcattactatatttagcctcaactttttcgaccatactctgaaaatgtcttttataatttatatgttcggaaataaaaccaaataatgtataaaaggccataactaaaagtacgataaaaaaaggtattgtattagtgagttggctattgcgctgtggtgaattaatcacacaacgctgttgattaacagcctctaaaaataccagtttttgaggtgctaaaggatcatcgtagtgatgactttccgcaattaatggtgtggtttctaattgttcagggtgttttgatactgtgcgtaaactggtcattccgtaccttccttatcaattttacgcatgccgttttttctcctgatcaagctttgccagaatctgttcgacctgttgctcaaaatcagcaggaagtgggtttttaccaaaagataaaaagggcttacgggcttggtaatcaacaggcgaaacagcatctcggccttgttgcatataggcattaagaaaagtaataaagcggtgatcttcagtatcactacttaataaaaaacctgtgtagtgagagacattgggacgatatatatgtattcctagctcaccagtttcaggatgtatatagaataatttaaatgctaacattttaccggcataaccgaattgagtatcttcataacgggttgccatcacaatgccatctacataagaatataagatctgtcgttttctatcagccaccaaataggtcattggcacaaagaaagcaagggagcttaagatatataatccactgggaaataaaactaaccatgcgaggacaaaatatttgtcatcttcactacctacaaaaaatttacctgaattatatgctttgatatattcccaccaacttatcttttcctttccaaagaaaggtttatatttatttatatccctaagtacaacgcgatcgttccctgtataataggtactataattttcaatttctttaatattatcttctaaagtatattttgtaataatatgtccttcaataaaattaaatagggtataaaacatcattactattaataccaaaaacatcgggacagtattcgtgaatcgaccattgacttgtgatgatttaatcttacattcttggttgttgatactttgtaaaaatacgagatcttttggcggtaaagggtcatcatagtgatggctttcatctattaaaggggaggtctctagttgttcaggaaagttagatatcgtaaatggattactcattattccatatcctcatcatgaatacagccatatattttatcgtcggggttgccgtttcggtaacgtagtggtgctattttccttttaagatgatctgctcagtaggtgataaatcaaagctccataaagtaagctaagaaaatttaagttgcccaaatcactttggtctgaattcgtcttgaaagcagtttaaactatctaaatattgtgcgacgaggcagagaaagataatatttgctttttttatccgctctgcatagatatcattttttgcataatctataaattcactaatattatgtgttaggttgagagttttataatactcgattgtacgtgaaattgtccacaatagagtattaaagttctctatgtaacacataaatattgactaggttgacctatagattgaaagtacacataatttttctttaatacagtgaaaaatgtttattgcttaatcttatgctgtgctaatattgttttattgaccattttagttcacaagaaaaatatatgactgttgttttaactaatgcatcaatttttaattatgcccaggtgaatgccagcacaataaatcaaagtgattccttaccgagtgaaataattatattataatagcaactattaatataaaaattcggagtccaaaataatggcttttaaatataaaataacaataatcatatttttgctatcttttattttttttgtagtgtatgagttttttattcccgttaaagttatgggagtacataaagatacgtataccacctctattctggttgagaattttccgataactgattatggaaaaataatatggtggaaaaacaatcaagatgttttagataaaaagtatgatttatttaaggataaaaatagtttatttttgatttctatatggaattacggtgatggatatttagaagaaggaaaatacgatcgattatgttttactgaaattaaaagtaacaaaaaatgtatagaaaaagataaagtgatgtcaataatgtattctttaaatgaagaggaaattaggatcggtaattctgcatatattaaagataaaaatggttcttttataaagaaagacaaggatgctaatacaactatcacagtagtccctaatgcataacttggtcacaagtggtgataatagcttattcacattttatgcttaaaaatatattttgctgtttatattaaaaatataacgctaaatctttgtgaaacaatgcgaagttatcgtgtttcgtctccatgtttgcccaatagcttctatgagaattttttattaattattgagttaagtaatattatccattgcaactgggcgctgtttttcatctaagtagtagtgaatgccggcctcaatattatcttcaccttcatagaaaacgttaaagcgggtacgttttccatcgtgataggcaatcacagcactaccgccttttcctaagcaaaattgctgaagatgccctgttgagatacacacgctgttatccccagatacagagagtgtgcagttatcacctgtgttgatagcaatggcgttatcgccagtaacagtaatatgtgctaaatcaccagtattggttatttttgtacgggattgagtcgcattaataaagtttcttatgccactattggcaatatgcgccccttgaccagaagcgtaaattttaacatcgttgccactattacaaatacgagagcgtcctcctaagctaccaatacgacattgatctgccgtattactgatctttccagcaaatccgctgttgattaattggttactataaccagtgttagcaatactgttttcatcaccggataaggcgacaatattatcacgaccacataatgcaagggcggtgttaaattgttggcttttgacaatcagttgatgccattcggtggaaaactggatgttttcgtcgctagattgcggttggtgatagggtaaacgttgtaatgtcacaccggtttgtttttcattgcctaacagggacaagatgttttctatcacttcttgttcctgtttggcaaaagaggactgactaaaatgacgcagataaatatattgaattaagctttctatccattgtgtttgacgttgttttatcaattcattatggatagcacggtaagtacctccatggggaaaataacgcaaaaaccaacgataaagtgaacttgaaacatgcagttggcgtaagtcttctttggttagtgtgatattttcctgtgaagggactgacatataagctccttgatccatctatttattagtgtctatggtagccgtcaaccatactgcgaaaggtttggaatggcgttcttccggtggtacacaggtaaaggtgaccaaagataaaaaagacactacacacggctagtatttggtgaattattaataaccaagctttaaatagcacagcatcagcagggataaacatgggattttgcagtaagatccccgtgattaaaagtaatggtactaatgcatacatcacacctaaataagccatttgttgcagtggattaaatttaaccttgggagtggctggaaaaggatgatcttcccccttaataatgccgtaaagataaaaacgtgtttgcattaatactcgttgcaaccagtttttactgtcaatacggtaaaatttaccattgccactaacaagattaattaatacaaaggacaaccagcatactaagagtagataaccacaaatttcatgcacattgacgagtaacgccgtgtcatgtgccgagagtagggcgaaatggttaatcccgccactgagaaggagtaagataaataaagttgcattactccaatgccataaacgtaccgcttttgagtaaagatagagtttctcttcttgatgatgctctccatggggtgtggcaaagcggtaacgtaaaaaaccatgaagtgcgagtacaagtagcatgccgacaaataatacgccggcaacaattaaccaaagtggtaaatagtccggtgtatagattaagacatactgtttgagtgaggcttgaaattgtgctgcatttggcatgatatttattgcactcatacgttatctcccccttgtacatgaggtccaacacgtcgataaagatgcggttttcctactccatcaagttgatagagatagtagtcatgtgtttttagccattgctgaatttgtgggctatcttctctaccaaagagtagggcgttttgtgggcaagcgctgacacaaatcggtgggaaccctttttgtaatcgagactcaagacaaaagtcacatttatcagcaacatgtgttacgggattaagataacgaacttggtaaggacaggctgatatgcaataactacagccaatacatttctctttattaacgcgaacaataccattgctttcatcgcgccaagatgcgcccgtaggacaaaccgagatacaaggagcatcttcacattgctgacatgagtgtctaaaaaaatggtacttatcgttatcttcttttaagcttaatggaatgtgtgcaatatccattcgcgccattccggttggtactttatttaatcgacggcacgctgtggcacaaatattacagccattacagcgtgtttcgtcatggatcatggcatagcgtatcggttttttatctgtggctgccgctaaggcactccccagtggcgcactgaaaaagatcacagaacctatacctgctacaaatttacggcgagaaacacgcattatttttgctcctcaatctgatgctgttgtaatacccacagaacatttcgtcgacagggtagagcactaaggattttcatattgttctacctccagccattctgttaatcctctcgccttgccataactcattagggtgctactaaataggtaaggggcattgttagaggcgaatatttgctgaatatcttgaaaatcagggtgagttttcatcagcgtcaatgcatcgtctatttctgcagcggtgtaataaaaaggctccaacatcaacatgctttgcttcaatggtcgagggtaggtttcgcattcaaagcgaactaaacctgcaatggcagtacaaatatcggtatatctattgagaagctgtaattgtgcatagttatctgacataacagtgtcagaatagaaataatcctcaccattatgtgttaaataagtaatatcaacgaaagtgtcctctttcaacgcgactcttaattgcattacctcttcttcagagagtgaataaggcgcatcatacagcgtggaaatagctaatagttcaccttcttttgaacattgacggattgcattggctaggtgttgttcagccgataattgcgcgatatcttcaatttgctcttctgtggtatccgttaaggtgtgagtaccatgcccaatacctctctctgataacggcaatagccaacgacgaagagaaatatccggttgttctaaagtaatatcagcatcatgagcaatatcaggtggtatagaggctgatgcattctgtttattcatcatgatctcctttacctattaattgggtaataagccacgtgatgctaaatcgtcagcaacatcttgtaatccaaggcgtactaaagttgcttttgttggacagcctaattgtggatcccagcccatttcttcataaaatagggtgagagagagttgcatatcttctctatccattttgtctgtcccttccgtaaagacaggaatatcaggatctttatcaaatacccatgaacagatttggtcatgctcattacgcatatccattgtgttcattaacttaaccgtgtaagcacgatgtaaagtgaagatgcgttctgaggctaaatcaagatcttgagaagtggttggttcaccggtaatggcagtgaaaaattttgcttccatatctaaatcgccacgatagttgcggcttttatgaggtgatacggtcattggccatacccagttacataatgtcacggcatcatgtaggcaactacgcaaaatggtccatttggtataggcgatttttgctttattaatcggcgtgtagtttttggtttcatcaaaagcatcaccagagccaaatagttcacctgcaatctctttttgtaattttagcggtaaaccactaccgatatagttgatatgagtatgtgtcatcgcatcgcggttaaacatacagttgacgatggagcctacttgagcagaagcttcatttgcatggtgaatagggaaacccatcggtgaccaaagtttatttttcttattaccccaatattcctcacctaaattccagcgttgtgcaattaaataagagccatcagcaaggtgactaaattcacctttacgatgggctaagcggtaatagaaatctttgataaatgcgggatcaccttcttcaagtttatcccaaggaatatcgttatactcttcttcagaaagaacgcgtttaaaaacgccgtgggtatagcaataagtaaagtcacgatgaagctgaccgtagttgcaccataagcccatatcatcaaaaatattgaggccgacaagattaccaacaacattggcatcgccttttttctcaatatctttcgggccattagggaaaatggtggtatgaacaaagttggcgacacaagtgtttccgcctgtttgaggtacgccaaatttttttgcttgcgggacattaagttgtgacatacagcgaatagggcatgagtggcatccccccatttttaccgtgtattgttctgcttctgggccaagatcgaaggttgatttcatggttctaaagccgacagtattggcattgcccggtgggatctcccctgtttcaatggggccaccttcagccgctccccaataaagccctttacgtgcagtccagcgtgaacccggatgtgaatactctgcccaagattgcggggtacttggtacaacgtgattattatttgcgccaatgagttgtgtcatcatatagtcgttaagctcttttaacgctttacgatcggcaacattaacgccacggcttccttcaaccacaatcgcttttaattttttagcaccaagtacggcaccaattccagcaccaccactgtggttacgactattgataagtcctgaaagagggacaaggttttcacctgcagggccaatagcagcaacacacgcttcagggcttgtttgagcacaaagttcttctgttgtttgacgagttccttttccccataaaaaagaggcatcttcaatggaaacttggtcatcatcaatatggatccacacggggttatctgcctgaccttcaatgatcaacgcatcatagccggcaaatttcatccatgcggcaaaaaagcctcccatatgggcatcaaccactaaattaccgcgagtaaaggttgaaagagaggtgatattgacgcgagagctacagggtgcgcctgatcctgttagcgggcctaccgcaaataccactttgttttcttcatcaaaaggttttacaccgggtgcaacttcttcatacataattttgtagccaaagcccataccaccaattaaggatttgtattggcttgagctttcgcgagagatggcaccggtagttaaattaattcttagtatattgccagtccagccgttaatcataatattgcttcctaatctaaagaggggtcaatgaggtgattgctaagaaaaatcaaacggtaatttctttccattcaataatgtgcaatgcccctgttgggcatgctgaagcgcattcaccacataaattacatttaccggattttttcgtttgtggattgacggttgccatcatccacgggcaagctgttgtacaagcggcacagccgatacaacgacgagtatcaacgacaatacagccaaactcttcttgataacggatagcttttactgggcagacgttcatacactcgggtgttttgcattggcgacaagtatcagtggtaaagtttaagtcgccatataagccccctccagagccaatgcctttatcaccaaaatagaaatgacgatggattttagtacgggagaagaaagatccaacgctaccatcattccatgttgtacatgctgtttcacaacgatgacagccagtgcaacgggcacgattagtcactaatacacctttaggtgtggttgtcagttgaataacgccactgtctatttcttcttgcttacaacctaaaagagaaagtagtgcgggtgctatggtgatccctgccagccctttaccggatattcgcagaaactctagtcttgatagtccaatatctaatataggacgatgatgtgtatcagacattaatatttatctccgcttaactaatttaaataagaaataatttgtgatgataaatgtgttcttttctctacttgtttttcgttgtatataaaatataataacgattggtttagaatagatataatagttatcaacactttttattactgaaaatagcttgtggtgaattgttaaatatttgtatttacaatatgttacattcggtttttacgtatttttcattaaccattatgatattgtggttattgaaaaatttattctgtgactgcaatcatagaaataaaattaattatcgttagttaaaaaattaaattaagtgattattgttcttatctgtaattacgaaggataattaatattgtttatatatattctattatttaaatagaatataaagacatttgttcttatattacgtttgaaattattattttaatggtaaattgatatttaatattaattatttatttaatgaaaaatgaatcttgattattattaataaaaaaagatattaataaattgtaaaacagtgacgagatcatttttataaaaaaagaaaccttgtctaataaagagaaggtttcttttgccaatggtattatatgactttatggttagtagcccacggctttacctgctggacgtcgaacatcatttgaaccataaagataaccttcgcgtatcgcccctgaaacagcagaatcattacctgacgaagcagggatcactccttgttctcctggaaggccgaccataatcaattcagccgcgccccatggcgtttgttcgaccattttatatcccatggcagaaagtttttctaaggtatcttttgataatcctcgttgttcataataaacctcatcaggtagccattgatgatgaattcgagggctattgacggcttcttggggggacataccaaactcaataatattaagtgccgtttgtaaggtgattgagataatacgagagcctcccggtgagcctaatacaagaaagggtttgccatctttagtcacaatggttggactcattgaggatagtggacgttttaatggggcaatactatttcgttcaccttgtactaagccataaagatttttctcgccaactttagttgtaaaatcatccatctcattattgaggaaaaagccagtccccggggcgataacgacagcaccaaaacgaccattgatggtgtaagtggttgaaacggcattaccatctttatcaatcaccgaataatgtgtggtttcagggctttcatgaggtgcaataccgggttgtactttttctgatggggtggctttattcggtgtaatttgttggcgaagctctgcggcgtaggctttacttaataacttttctgttggattgtttataaattgcggatcgccaagaaaggtgtttctatccatataagcatgacgcatagcttctgtgagcgtgtgaacatattcggcagagttaaaacccatcgatttcagatcgtagccttctaaaatattcagtgtttggcaaatagtgacgccccctgaactgggaggaggagcagagataaattcataacctcgataagtacaggtaatgggaggtgtttcggtaatagtgaagttcgcaaaatcttctttggttaataacccattatgctgttttgaagcttgttctacttttttagggatttccccttgatagaaagcatcagcaccttggttggcgataagttcaagtgtattggctaagtctgtttgaatgaggcgatcgccaggctgccatggtgttccatcaggctttaagaaaatttttgctgattcaggatcttgtttaaatcgctctgtggtggtgtctaatacgtcagtatcagcacgggttaaaatatagccttctctggctagtttaatagcgggagccatcacttcttggcgtgaaagagtgccatatttttctaatgctgcatcaagtcctttcactgtacccggcacccctgaggcaagatagccgtataggcttgcctctttaatcaagttaccgtctttatctaaatacatatttttagacgctgccgtaggcgccgtttctcgaaaattaataaaggtattggtgccatcagcaaggtgtatggtcataaagccaccaccgccaatatttccacaacaagcatttaccacagcttgtgcatagccaacagcaacagctgcatcaatggcattccctcctttttgtaaaatatctttccctacttgtgaggctaaatgttgtgaagagaccaccataccttgttgtgcttcaaccgctggctcataggcggcatagagtgcaggtgaaaaaagtgtggtaagtaacagcaggtgcgttttttttatagtaatcatgattatatccattaataacagtgggttagtttcaatagagataagtgaaagtaggtgtgtatacgctagtattaatgtggttaacaattacgtaacaataagtatagagagaagttattaatgacgagaattttttttgaagagatgatcacaaaatcatctttaagcgaataaataataatgttatgtacaaatagtaatcttaataaattgagttgaaaggcaaaagaatagatggagtattaataaaaaagcctgttttcacaggcttttagcaaatatttgtttagcttactggaatattacagtttgcctgagttcgctttcagatatttagcaacaccgtctggagatgcgcccataccttcttggcctttttcccattgtgcagggcaaacatcaccgtgctcttcgtggaattgtagtgcatcaaccatacggatcatttcgtcaatattacggcctaatggcaggtcgtttaccacttggtgacgaacgacaccttctttgtcgattaggaatgaaccacgtagtgcaacacccgcttctggatgttcgataccgtatgctttaatgatatcgtgtttgatatcagcaaccattgggtatcttacttcaccaataccgccatcatcgatagctgttttacgccatgcgttatgtacgaattctgagtccatagaaacgccgatgatttcaacaccacgtttttggaactcttcaaaacggtgatcaaatgcaatcagttctgaagggcaaacaaaagtgaagtccattggccagaagaaaataaccgcaggtttgcctttgataaatgaatgcaggttaaaatcattaacaatttcaccgttacctaaaacagcagctgctgtgaaatctggggctttgcgagtaaccagaaccataatgtactcctgtaaattgaaagagtttatactcgtcatatttcaagttgtcgcgttgttgactgcgttcactcgaactatttagagtaaatttaggggataccctgtttttaaatttagggtgatgccctgtttttaaatgatgtatacagcataaataatcaatcgttattgataaaatcatacagaacaatctatttgataggttataacgatgaactttatacaacaaaaatgacttatttatgactccttgtataactatctattctaatcaactttataaatgaatactacgcttgttaacggatcgttaccaataaaaagataaattgacgtagtctctgtttgctcgattcaatgtaatgcttaaccatgacaaacagatgaataaaaagagccttaatgtatcagtcatccagctgatgatgttgtgctctttctaacaattgtggataaaattgccaaaaaatctcacttaactctttataatgcgtttctagtgcaatataagagcctgcaagcgcacttaaacgcggtcttctttttgccatgccttttaacgtctgtgctatataagttttatcagcataacgagtcaaccacgcttggggccataaatattcattgagctcttgaaatttttccggagttcgccataaatccggttcaatggtattgcgcacataagtaacaaattccaagagcggtatgtcaggttcaaatttatcccaatgtagtgagagaaaatgatcccaaaatatatccaaagtaatgggtgcaacgcggcggtattcattcggaaaaagttgtcgagcttgtttaactaatggatgagtatcagtcagcacatcaatacgcctatgcatgcgaatgccgtcaattaccgcttggctgtaatcgttactcggcgtaccttttacatagtccgccatcatattgcctaataaggagcttttcgctctaaaggcgaggtgtaagtgagcaagatagttcattgtactatcatagcgctttttaaataaaaaagtgcttctttgttgcactgattaacatgcagcactagactagtgcgcctgttttttatgaaagtagtcgtttaattatgcgtgtatccgattttagatttgacctgcctgagtccttaattgctcactatcctcacccccaacgtagtgggtgccgattattatccctagaggggaaaacgggcaatttatctcacggtgtctttacggatgtattagataaactcaatgccggtgatttacttgtatttaataatactagagtgatccccgcgcgtatttatggtcgtaaagcctccggtggcaagatagaagtattagtggagcgtatgctagatgaacatcgtgtgttagcccatgttcgtgcatcaaaatcacccaaagagggcgcatcactgattttaggggaagacgaaagtgtacaagcaaccatgattgcacgccatgatacactatttgaaatccgttttgatgatgaaagagatgtgctgactattttaaatagtatcggtcatatgcctcttcctccttatattgatcgtccagatgaaagatccgataaagagctttatcaaacggtctataatgagcgtcccggtgcagtagctgcacccacagccggattgcattttgatgagccgttattagaagcgttacgtaacaaaggcgttgagatggcctttgtcactttgcatgttggtgctggtactttccagcctgttcgtgtggataatatcgaagaacacactatgcattccgagtatgctgaagtccctcaagaggtggtagatgccgtgctcgcttgtaaggcacgaggtaatcgggtgattgccgtgggtacaacgtctgttcgctctttagagagtgcggctaaagcagccaaagatgcattaattgctcctttttttgatgatacgcaaatttttatttatccaggttaccaatatcaaattattgatgctttgataactaacttccatttgccagaatcaaccttaattatgctggtttctgcatttgctggttataaaaataccatgaatgcttataacgtagcggttgaacagaagtatcgttttttcagttatggtgatgcgatgtttattacgcgtaatcctttagctatcaatgaaaaagtgggtgaagagtagggctttattctattttttaacgttttttttcattttatgaccggttatgtcaattttgctgcttgatctctttgactaagcacagcttttgttgatgtaacatatacagccgtctaacaaatgattagaatgtgctgtttttattatgcattggactgtttttctgatgcttggaggatgagtgaaatacgaattagataaaacagatggtcatgcccgtcgtggtcgtcttaagtttgaacgcggtgtcgttgaaacacctgcatttatgcctgtagggacatacggtacagttaaagggatgacacctgaagaagttgaagccacaggtgcacaaatccttttaggcaatactttccatttatggttacgtcctggtcaagagatcatgaaattacacggtgatttgcatgactttatgcagtggaaagggccaattttaaccgattcaggtggtttccaagtctttagtttaggcgcaatgcgtaaaattaaagaagaaggtgtgcatttccgtaacccaattaatggtgaaaagattttcttaagcccagaaaaatcaatggaaattcagtacgatcttggatcagatattgtgatgatcttcgatgagtgtacgccatatccatcagattgggattatgctaaaaattccatggagatgtcattacgctgggctaaacgtagtcgtcaacgctttgatgaattaaacaacaaaaatgcattattcggtattattcaaggcggcgtttacgaagatttacgtgatatctcagtgaaagggctagtggaaatcggctttgacggttacgctgttgggggcctagctgttggtgaacctaaagaagatatgcaccgtattttagaacatgtttgtccacaaatccctgcggataaacctcgttatttaatgggtgtaggtaaacctgaagatttagttgaaggtgttcgtcgtggtatcgatatgtttgactgtgtgatgccaacacgaaatgcacgtaatggacatctgtttgtaacaaatggtgtcattaaaattcgtaatgctaaacatcgttcagatacatcaactctggatgaacattgtgattgctacacctgtaaaaattatagtcgcgcttacctacatcatcttgatcgctgtaacgaaattttaggtgcaaggctgaataccatccataacttacgctattatcagcgtctaatggctgaaattcgtcaagcaattgatgagtcacgtttcgaagatttcgtgcatgagttctacgaacgtattggtaaaccagttccaccgctaaatagcagtgcgagtaagtgcgattaatgtatacgagaaagcccaattctgtgtatgatattgggcttataacttgagtatcgtcgatatcgacaacaatgaggaaaaagtgaatgagttttttcatttctgatgctgttgcttctgctggacaagcagcacctgaagcaagctttatgtctattttaccgatgttagtgatctttattttaattttctattttatgatcctacgtcctcagcaaaaacgtactaaagaacaccgtaaactgatggaatctatcggtaaaggtgatgaagtgttaactactggtggtttaatcggccgcgttgttaaagtttcagataacggctatatcgttgttgctctgaatgaaacaactgaagtaactatcaaacgtgactttgttgccgctgtattaccaaaaggcacaatgaaagctatttaatttgatttccccaaagggaaaagggaactgccgtgctaaaccgttatcctttgtggaagtatctgatgttgatattcgctatcctcatcggtctgctttacgcacttcctaacctatatggtgaggatccggctgttcaaatcactggcgcgcggggaaccgccgccaatgagcaaacactggatcaagttcgatctttattagataaagaaaaaattgaagcgaaatcaatcgcccttgaaaatggtgcgattttggctcgtttcagtaaccctgacattcagttacgtgcccgtgaagcgttgttacctgcgttaggtgacaagttcgttgttgcacttaaccttgcaccagctacgccaaaatggttagaagccattggcggtgagccgatgaaattagggttagacttacgtggtggtgttcacttcttaatggaagttgatatggaaaccgcgttaggtaaacttcaagaacaaaatgttgatagtttacgtactttattacgtgacgaaggcattccatattcttctatccgcaaaacggataattatggtgttgaaatccgtttccgcaacgctgatgaccgttctaaagcatcagattatcttgcgcgtcgtaaccaagatctcatttttagaaatggggataataactcgttaaaagctatttttaccgacgagcgtttacgtgatgcgcgtacttatgcggtacaacaaaatatcaccatcctacgtaaccgtgtcaaccaattaggggttgctgagccattagttcaacgccaaggtgctgaccgcattgttgttgaattaccgggtattcaagatacggctcgtgcgaaagaaatcctaggtgcaacagcaacattagaattccgtttagtgaatactaatgttgatccttccgccttagaaacaggacgcatcccgggtgactcagaagtgaaatacactcgagatggtagaccaaccattctttataaacgtgttgtattgacgggtgaccatattaccgattcaacgtcacaagccgatgagtacggccagcctcaagtaagtatttcacttgatagtgctggtggctctattatgtctaactttaccaaagataacgtcggtaaaccgatggctactctttttgtagagtataaagacagcggtaaacgtgatgaaaacgatcgcgcaattttggtaaaaaatgaagaagttattaacgtggctaatattcaaacccgtttaggtaataacttccgcattactggtatctctaatgcgaatgaagcacgtcaattatctctgttattacgtgctggagcattgattgcacctattcaaatcgttgaagagagaaccattgggccaacattaggtcttcagaacataactcaaggtttagaagcttgtttatggggtctgatagcctctgttgcctttatgattatttattatcgtaaatttggtgtgatcgcgagtacggcgctattagcaaacttggtgttaattgtgggggtcatgtcattattacccggtgcaacgttaaccatgcctggtattgcgggtattgtcttaacccttgcggttgcggtcgatgctaacgtactgatcaacgagcgtattaaagaagagttacgtaatggtcgctcagtacaacaagctatccatgaaggttataaaggtgccttctccagtattattgatgcgaacttaaccacgttaattactgccgtgatcctttatgcagtcggtactggctccattaaagggtttgctatcacaactgctatcggggttgcgacatccatgtttaccgctattgtgggtacacgtgcgattgtaaacctgctgtatggcggtaaacgcatcaagaaactgtctatttaaggagcacgttgtggcacaggattatactgttgaacaattaaaccatggtcgtaaagtcattgactttatgcgttgggacaacgtcgcctttactatttcgtttctgcttttggtagcatctattgctatcatttccgtgaaaggatttaactggggattagattttactggaggaacggttattgagatcaatctcagtcaaccggccgatctagataaaatgcgtgatagcttggcagccgccggctataaagatcctctgttacaaaactttggtagcagccgcgatattatggtgcgtatgcctcctgttgaaggacaggctggtcaagaattaggtaagaaagtcatcgatattatcaatgttgaaattgataatgatgcaacagtcaaacgtattgaatttgttgggccaagtgtcgggagtgaattggctcaaacaggggcaatggcgttactttctgcacttatctgtattctgatctatgttggattccgttttgagtggcgtctagcattaggggctgttatttcacttgcccatgacgtggtgatcactttgggtattttatcactcttccaaattgaagttgatttaaccattgtggcgtcattgatgtctgttatcggttattccttgaacgatagtatcgtggtatcagatcgtattcgtgagaatttccgtaaaattcgtcgtggtacctcttatgagatcatgaacgtttcattaacacagacattaagccgtaccatcatgacatcagcaacaacattattagttgtgttgatgctctatatctttggtggttcaatgcttaaaggcttctctttagtgatgttaatcggtgtttcattcggtactgtttcatctatttatgtggcttctgcattagcactgaaaatgggcatgaaacgcgaacacctgattgttcaaaaagtggaaaaagagggtgcagatcagacaacactcttaccttaatagagcgtttttctgacataaacatcgcaaacaccctgccagttaatgactgacagggtgttttttgttcactgaacaggtacactgtttaggagttttgtcaacagtaggaataactatgcattgtccattttgcacagccgtagataccaaagtaattgattcgagacttgttggtgatggctcacaagtgcgccgtcgtcgtcaatgccttgtttgccatgagcgctttactacctttgaagtcgcagagcttgtgatgcctcgtgttgtgaaaagtgatgaaatccgtgagccttttgatgaagaaaagctacgtagaggaatgctcaaagcattagaaaaacgccctgtgagttctgatgatgttgaagctgctattaatcatatcaaatcacaattaagggcaacgggcgaaagagagataccttccaaacagatcggtaattttgttatggaacaactaaagaaactggataaagttgcttatatccgttttgcttcggtttatcgcagttttgaagatgtgcgcgattttggcgaagaaattgcaaaattacaagattaatcattcgcttcacaccttcacacgactatttgaaaataacgataaataataaatctatgatgacaattaacaacagcaacaatcttacgggcaatgagccggctaatgatgaaacctatatgcgtcgagcgatagagttagctgcattaggacgttttacaacatcacctaacccaaatgtgggatgcgtgattgtgaaagaagggaagattataggtgaaggttatcaccatcatgcaggtggtccacatgccgaagtgaatgcattaaatatggcgggtgaaaatgccaaaggtgctactgtctatgttacgcttgagccatgtagccactttggtaaaacgcctccttgtgctgatgctttaatcaacgccggggtaaaacgtgttgttgctgcaatgcaagatcccaatcctcaagtggcaggacgtggtttacataaattagtcgctgcaggtattgatgtttctcatggcgtattaatgcaagaagctgaaaaattgaatatcggcttttttaaacgtatgagaacagggtttccttatatccaattaaaactggccgcctctttagacggtaaaacggcattagcatcaggggaaagtcaatggataacctctaacgcttcgcgacaagatgtgcaaaactttcgcgcgcaagctagtgctattttaacaacgagtgccactgttttagccgatgatcctgcaatgaatgtgcgttgggaagcattatccgatgagataaaagcgatttatccactagagtcattgcgccagcctattcgcattattaccgatagccaaaatagggtaactcccgactataaaattacacaacttgcaggtgagtgcttgcttgctcggactcactctcagcaagaagcttggcaaggtgatgtctcagaaattttgcttcctactaatggcaaaaatagtagtgtcgatttagtgttattaatgatgcagttaggtaaacgcaatattaatagtgtatgggttgagagtggcgcacattttgctggcgcactattagagcttggtcttgttgatgagcttatcatttatattgctccgaaaattttaggcaatgatgctcgaggtttattatccatttcaccactgtcgtcattatctgaagctcctgaatttacaatagattctcttcaacaaatcggccctgatatccgcgtttgtttaaaacctcgttattaatagatgcaaatatgtgtgtctatggcgctatttgtagtaaaatagcgccgtgtgtgttattccctgtcgttacgacattgttatcagccaactaactaccttgatttatcaaggatttttggctcctttgctgtgttatcataaaactgagcgcagtaaaggaaagaatgtgataaaatccgcgccccgcggataggagaaaaaggtaacctatgaacgtaatcaaaggtgttgtcgcggcgccaaacgcacgtgtagcgattgcaattgcccgttttaataattttattaatgatagcttgttagaaggtgccgttgatgcacttgagcgtatcggacaagtttcctcagaaaatattaccgtcgtttgggttcctggtgcttatgagttgccattaactgtaaaagcattagtagaaagcgacaaatatgatgccgttatcgcgttaggcactgttatccgtggtggaaccgcacattttgaatacgttgctggcgaatgcagctctggcctttctcatgttgcaatgcaaagtgagatccctgtgacttttggtgtattaaccactgaaagcattgagcaggcaattgaacgagctggtactaaagcgggcaataaaggtgctgaagctgcaatgacagcacttgaaatgatcaatgtacttaaagccattaaaggctaatcatctgttttaactaaaggggaattttgtgaaacctgctgctcgtcgtcgtgctcgtgagtgtgctgtacaagctatctactcatggcaattatccggaaatgacatcgcggatgtggaattggagtttttatccgagcaggatacccaaggtgtagatattgcttatttccgtgagcttttagtgggtgttgcaatcaatgcagcacgtttagataaggcgatggagccttatttatcacgtcaactggaagagttaggccaagttgaaaaagcgattttacgtttagctatgtttgaactcagcttccgtgaagatgttccttataaagtagccattaacgaagcgattgaattggctaaggtgtttggtgctgatgacagccataaatttgtcaatggcgtgttggataaagctgcaccaactgtacgtaaaaaataacgttcttcacgtttcctctatggtaaattaataatccaaggccggttactccggccttttatttaataagcattgcttcataggaaattgataatgccttgtggtgaattctccctcattaaacaatatttcacttctcagccagttaaacgcaaagatgtgagtacgggaattggggatgactgtgcaatattgactgtacctgaaaagcaacaagtggcaattagtactgataccttagtcagtggaatacacttcctgccaaccatttcccctgaagatttagcgtataaagcattagcggttaatattagtgatttagccgcggtgggggcagatcctgcttgggcctcattagctttaacattgccaaaagtcgataatgattggcttgaggcctttagtcgctctctatttgcattagcagagtattattctattcaattgattggtggggatacaaccaaagggccattgagcttaaccatcacaatacaaggtttagttcctcaaggtatggcactattacgctcaggggcaaaaattggtgactggatttatgttacaggctttttaggtgatagcgcggcaggactcgcggttttacaaaatagattacaacctagtcaaccagaaagccgagactattttattactaggcatttgcgtccgcagcctcgtcttttacaggggcaagcattaagatctttagcaagtgctgctattgatatttctgatggtcttatttcagatctaaaccatattttaacggcaagtggttgtggtgctcgtattaacttagatgcgttgccttattctgcggcaatgaaatcacaggtgagtaaagagcaagctgaaatttgggcattaagtggtggcgaagactatgaactatgctttaccgtgcctgaaataaatcgtggggctttagatattgctttagcccatacgggagctgactttcattgcatagggcaaattatgccaattgcagaaggtatacgttatttacgtgaaggtaaagaagtgcaccctaatctgaaagggtttgatcactttggtgataataaataaatcatatcgctataaacaaaaggcgcttaatgagcgcctctgaaatcaaaataatgttattaatcattttaatgataattcaagattagcttttcttcacaaattcagattttaatttcatttgtccaaagccatcaattttacaatcaatattatgatcgccttccactaaacgtatccctttaacttttgtaccaattttgagtggcgttgagctaccttttacttttagatctttaatgactgtcactgaatccccatcggctaataaattaccatgggcatctttaacaatcagctcatcgctatcagttgttggctcagcatcgttccattcgtgggcacattcagggcagacatacattgccccatcttcataggtatactctgagttgcatttaggacaagaaggtaatgacataataatactctcaaattttttcaaaatgggaagtgattaatcgtcacaaagaggataacacttgcccgataaacaaaaggacacattatcgtttcagcgtaaaaagtctaatatgatgacccaaatgaccaaaaatagtattgccacagataatgcgaaagaataagagtataatagatctgatagagttttgcatctttcatggattattggataaaagatgagaaaaagtagattaaatataggaggtaatacacaaaataataagaaataatatcatttaaaaatataaattaacttattgattttataatgctttattttgttaacttagataaaataactactctctctttaaaagagagtatcagtaataatagtgttaatcttcttgttgttattttataaaatttatcaccggcctcgttcaatcagtttgggggtctgagttaataacggtccaatcctcaattcttaaaccatcaactctttcaaattctcgagtattattggtaacgactattagccccttacttctagtatgtgcggctatatgtaagtggttatcaccaacgtgttttccctgtttttctagtgttgctctaatgtctccataatgaaaagctgctaagtcatcgtaagataaaacagtcagtcgagaaacaaagtcgttaaccgtagctaagtttttggctggatttacacttttttcagcaccaaaaatgagctcagcgagtgtaattgtagaaatagctaattgttcagcatgttggttgaattttggtaataaaaactcaggcttgcgtttaatagtgaatataacaataatttgtatctaataggtatttaatcatcaaaggatcctctttcacttgtggcttgatcaggcctttcagataagaaatcatctgttacagacttttctgataagaaaaagctatcccatgcattttgtataggtgtgattattctctctttgcctttgacgcgaacaaaaacttcttttacatcatccggaaatcgagtctcagcgggtaatcgaacattttgtgttctattgctcataaatactttgccatactggatcatagtaatagctcctataaaaactgccatatagcagtttttataggataccaaataggttgtgtgaaatatatacacaacctattaacctattaatgtaaaagattatttcctatgagctatcaccgagcctcgttcaatcagtttgggtgttaacactaatagattggcttgtgcttcaatatcttccatacgacgtaataattggcttacagcaagtttgcccaattcatctttgggttgatgaatagtcgttaaaggggggatcatataagaggctaaatcgatgtcatcataaccgacgatagaaatatcatcaggtacacgtagtcctttttgataaatcgcttggtaagcaccgaccgccattgcatcattacaggtaaatacggcctgtggttgtatagggagtgagagcagtgtttgcattgcactaaagccacctgcaaactcaaaatcactggttaaaaccagctctttacgaatgggtaacccagcttgttgcatcgcattatagtagccttgtaggcgatgtttagcgggaagtttatcttggggacccgcaatacaggcgatgtcagtaaaacctttttcaattaaataattcgtggctaattctccccctaatagggagttatcttgaataatatcgctactgtattcaaatggagaccaatccatcatcaccatgggtaaccgtggataacgatttaatacttcacttgatggtgcgcgggcttcagtacacattaataacagcccatcgacacgcttttgtagcaaggtttcaaggctagtatccatgcgctcatagtcgccttcggtgttgcataaaatgaggctatagccttgttcatagcaacttcgttcaacacctcgaacgacttcagcataaaaggggttattactggcggtaactaacatccctatggtacgtgtgcagttcatttttaaactacgagctaatgctgaaggggcgtaatttaaggttgctattgcatgattaacctttgcgcggataccttcactcacataacgattgttattgataacatgggaaacggtggatgttgaaacacccgctaaacgggcgacatctttcattgttgccaaaatattatgctcgctctgctaaaaatgacttaatttcatcacgccaagggacggaggattgcgcgccatgacgtgtcactgcaattgccgcggctgcatgggcgaaacggatcgcatcatgagctgatttaccttctaatatcgctgtaacaaatgcaccgttaaaggtatcacctgcggcaatagtatcaactgcttcaacacgaaaaccgggaatgatcataccggtgccttgttcactaaaccatacgccacgactgcctaaagtgattaaaacgtgttttatgcctttactgtgcaaaatattagccgctttagctgcacccacttcatcatgcacagaaataccggttaatatttcggcttctgtctcatttggcgtaataatatcaataaaactcagaaattcatcagataacggctgtgcaggagcgggatttaaaatcacttttgtttgatgtgctttggcttgttttgctgcctcaaagacagtgtctagaggggattctaattgcattaataaagcatctgcttgttcaataatatgacgatactgatgcaaatggcttggagtgagagcactatttgctccggcaacaatgctaatgacattttcgccttgttcattaactaggatcattgctacacctgtaggtgtcttgggaataatacgaattgcatcagtatcaatattatctgtttttaattgagcgatgatttcgcgaccaatagcatcatctcccacacaggctataaacgtgatatcggcaccactacgtccacaagcgacggcttgatttgcccctttaccaccaaatgctattttatagtcatgaccaatcacggtttctccgggcttgggaaattgtgcaatattcataatatggtcaacgttaatgctacctaaaacagcaaggcggggagttgtcatagcctttatcctttgaaaacctagtttataacgaaactaaccacgcagtgaaagtactacgtggttagatgggtgattatttttgagtgactaattcaagctcaacaggaatagtgggatccactttttcccctttcagaattttatcagcggtttgaataccaataataccaatttgatcggggcgttgtgcaatagtcgcacctaaaacacctcggttaaccgctttaatgccatcatttgtgccatcgaagccaacaactaagacatcggtacgacctgcagtttgtaatgcacgcaatgcccctaatgccatttcatcgttttgagcaaataccgcttgcactgaaggattagcggttaatagattttgcataacattaaggcctttagtacggtcaaagtcagcaggttggcttgctaatatattaagtttgtgagcatcaacagcttgtttaaagccttctccacgctcacgagaagcggaggttccggcgatcccttctagttggatcactttggcatcattacccactttttccgcaatataatctcccgccatttttcctcctaggcggttatcagaagcaacatggctaacaacctcacctttattggctactctatctagggttactacaggaattttagctttatttgccattaacacggcattacctacagcatcagaatccgttggattaatgagcattaaacgggtgccttttacggttaagtcctgcacatttgccaattctttggctggattatccattgaatcaagtacgactaagtcataacctaatttatccgcctctttttgtgcactgtctttcatggtgacaaagaaaggattattgagcgttgaaataacgagggcgatagactcttttgctaatgcattggcacttatggtagcgcttagagcaaccactgagagaagcgttgctattttttttagtttcataatatattcctgtcggggttcggattaagagaaagcgtattattttttgttatcaaccagcacggcaagtaagatgacaacagctttgactatcatttgataattggatgatatgcctaataaattgagtgcattattgagaaagcctaaaattaacgcaccaataagtgtgcccattatgcgtcctttaccgccagcaagactggtaccacctaagacgacagcggcgatagcatccagttcataaccattgccagccattggttgggcggaagaaagacgagcaacttcaatgacactggcaagggccgctaataaaccgcaaagcgcataaacaataattttgattttatcgacactaataccagataaacgggttgctgcttcgtttcctccaagggcatagatatagcgacccaagcgtgtgtgatgcaatacataccacgcgcttaaaaagacaatcatcatcagccaaataggggtggggatcccaaaggggcgtccaataccaaaccagctaaacaggtcggcattatcgctaaatcctgtatttattggactgccatcagtataaacacgcgtgacaccacgcaataacagcatcatcactaatgtggcaataaatgcctgcactttacctttagcgataatgacacctgtaacgccaccaatagctgctcctaatgctaaagcaccgacaacagccactaacgcattaacatcagcccctaccatagaagcagcaacagcaccggttaaagcgagtaatgaacctaccgataaatcgataccagaggttaaaatgactaatgtcatacctacagccataattgcgttaacagaggtttgttgtagaatgttaaaaatattatttaaggtaaaaaaattcgggctgagtgttgaaaccacgacaataagcaacaataaggcaatgagtgatttttgttctaataaccaagccttagagaaccatcgttttgacgctggtattgattttgtactcatctcaaactcctactgtagcaccatattgtttaccaacagccgccgccattagcatctcttgtgtgacattattggcagaaaactcaccgctgatacgaccttcatgcataactaaaatgcggtcactcattcccattacctctggcatttctgaagagatcaaaatgatgcttaatccctcttgtttaaacttattaattaattggtaaatctcttttttcgcccccacatcgacaccgcgggtaggctcatcaagaataagcactttaggacgagtcattagtccgcgagcaatagcgactttttgctgattaccgcctgataaaaaaccaatgatctgattgatggacggggtttttatgttgaacaatttaataaagtcactgacagttaattgctcttctttatgatttaagatccccatagtgcgactaaaataaggtagcgccgtcagtgacatattctcttttactgacatacctagcactaaaccatcgcgttttctgtcttcagagatataaacaataccttgggcaagtgcatctgcaggctttttgatctgacaaattttaccttctaacgccacgctaccttgtgtttttggcaatgcaccgtaaatcattttcattaattcagtacggcctgcgcccattaaccctgaaatacctaaaatttcattttcatatagggagaagctgacatcatgtatatctgcaccacttaagtgagagacattaagtttagtttttcctgcaggaatatggatgcgagggtattgatcttctaatttacggcctaccatcatttcaataagtgtctcttcttgtaatgaagaaacgggcttttcgccaataaattgaccatcgcgcaacacagttacatcatcacaaatatcaaaaatttcttttaatcgatgtgagatatagacaatgccacaaccttgatttcttaattcagttatcacactaaacagagagcgagtttcggtgtctgtcaatgcatctgtcggttcatccataataatcactttagagccaaaactgagtactttggcaatttcaaccatttgctgatcaccaatggataattcagaaactgagcgatgactgcgataaggaaggtttaagcgagcaagtaatttatccgcttctgcatacatttttttccaatcaatggcaccaaatgcacgggtaaactcgcgacctaaaaagatattttctgcaatggttaattcagggataagattgagttcttgatggataatacctattccggcttcttgagaagacttaggaccattaaaagagcaacgttccccttgataaataatttcacctgcgtctttttggtagatacctgttagcactttcattagtgtggatttacctgcgccattttcaccaacaagtgccatcactcggccaggataaattcgtaacgtcgcaccagataatgcttttacgcctggaaatgatttatcaatattttttaattcaagtaatgcttccatattggcctcagaaagtcacaccagaaaacagcacgatattggcataaggagagcattcacctgttcttatcaccgctttattatctggaagttgtgttttaaattcttcatgagtgacataaatgatctcgataggttttttttgttgttgttctaataaatgcaaataacgggttatctcactaaaaagaagtgggtttatatttttaatttctatggcaagcataacggcttcgacttgcatttcatgggtgatcgtttgtaacactgacataaagtcagggatcccctgagttaaagcaagatcgatacgctcaacagaggagggtatgggtaatccagcatctgcaatcgttattttgtcagtatgccctaaacgtgcaattacgctagaaattgaactattaagtaatacaccttttttcatctttgcctcctcagcgaaacgtttcgctgttctacatagtaggaaatgaaaataggaaaacaagttggatttatttatattgtgaaggtgatcgaaacgtttcgttaaaggaaagaaaaaaggaaaaatctaactgattgaatcaattaacgctgaatggattcaattttaaaattgataaattacagttaatttcattaaaaagtgatctttaacaagatttgaaaataattaaaaaagaaaagaaataagggcagtttttacaagaaaataaagtcagaatttattaaccttatcaatagtctctccggctttacaagcaagagagacttttgaaatattatctcaaagaatgagcctgataagctttaatcgatttttcaatgcctgttgcatcaagtcctaaatcggctctgatctcttcttgtccaccttgtggcacaaaaagatcaggtaaccctaaattgagtacgggcactaaacaacgctcttgcattaataactcgttaacgccgctacctgcgccacccataatggcattttcttctaaggtgaccagtatgtcgtgttgtttggcaagggaaaggatcagttctttatctagtggtttgataaagcgcatatctgcaactgttgcatccagtttttctgcaacatctaaggcttcgggtaataaggttccgaagtttaaaattgcaatacttttaccttggcgacgaataataccttttcctataggaagttcgctcagcggttgtaatggcgcaccaacccctgatcctctaggataacgtacagcgacaggcccttcttgataatggtaacctgtgtgcaacatttggcgacactcattttcatcgctaggtgccataataatcatattagggatacagcgtaagaaagagagatcaaaagctccttggtgggtctgaccatccgcaccaacaatgccaccacgatcgatagcaaagagtaccgggagtttttggatagccacatcgtggatcacttgatcataagcgcgttgtaagaaggtagagtaaatagccacgatcggcttataaccaccaatagctaatccagcagcgaaggtgacggcgtgttgctccgcaattgcgacatcaaagtattgtgcggggtactctttagaaaagcgcaccataccagagccttcacgcatagcaggggtgattgccattaacttttcatcagtggcagcttcttcacataaccagtccccaaaaatttttgaaaacgtcgggcgtgcattcgggcttttaggtaaagtacctgtctttggatcaaatttaggtaccgcatgccaactgattggatcttgctctgcgggagcgtaaccccgaccttttttggtcataatatgtaaaagttgcggcccttttagatcgcgcatattcgtgagcgtttgtactaaagcaataacatcgtgaccatcaactggaccaatatagttaaaacctaactcttcaaacatggtgccgggcacaaccatgcctttaatatgttcttctgtctttttcagtaattctttaattgggggaataccagaaaagacttttttgccaccttcacgtagcgtggtatacagtttgccagatagaagttgtgcaaggtggttatttagtgccccgacattttctgaaatcgacatttcattatcgttaagtaccactagcatatctggattaatatcaccggcatgattcatggcttcaaatgccattcctgcagtaattgcaccgtcaccaatcacacaaacagtctttctgcctaggttttcttgctctgcagcaacagccatacccagtccagcactgatagaggtggatgaatgaccaacacagagtttgtcatattcactctcatcacgccaagggaagggatgtaagccgtttttttgacgaatagtatcaatgcgatcacgacgacccgttaatattttatgaggataagcctgatggcccacatcccaaatcagattgtcaaagggagttttataaacgtaatgaagcgcaaccgttaactcaatagcacctaaacctgaggcgaagtgaccacttgagcggctgacactgttaagaagatatagccttagctcatcacagagtttaggtaaactctcttttggtaataggcgtaaatcttcgggtgtttcaaccaacgccaatgtgggatatttttcgatatcaatgctcatgtgatgcctattaattaatgacttgtaatagggaaagagcaggtaagctgctctttttattttttattagtttttccgttctacgataaaattcgctaattgttttagcgtagaggtatcgtactcgtattgttcaagaaacgctaaggcatccaatgcttcgttatacaattcctgtgctttcttttgtgcttgtgctaaaccaagtagagccggataagtactttttccagcttcttgatcacttccctgtcgctttccagtctcttcagtgctcccaataacatctaaaatgtcatcctgaacttggaaagccaagcctatagagtgggcatatttatccagtgcaggtaacacatcgtgccctttttgccctgcgctaagtgcccctaggcgaaccgctgcacgaattaatgcacctgttttatgtaaatgaattttctcaagagcgacaagatcaattgatttatcttcggcatcaagatcaagtgcctgtccaccacacatacccgctaaaccactggctgtggctaattcagcaatcatggctacgcgatcggcaatggcgacatcaggcatcgcatttttggctaaaatttcaaaggccaaggtttgtaatgcatcacccgctaaaatggcattggcttcgccaaactcaatatgacaagtgggttttcctcgacgtaaatcatcattgtccattgccggtaagtcgtcatggatcagtgaatatgcatgaatgcactcaatagcggctgctggcacatcaagattagcaacaggtacgttaaacatttctcctaccgcataaacgagaaatgggcgtaaacgtttcccccccaagagtgctccgtagcgcattgcttggctgagtggcatatcagaaaaaggcaacgtttgtagcgcttggttgagtgcttcatcaacacgctgatgtgcagaatgtaatttttgacggaacgcatccgtacataaagttgcgttactcaattattcagcctcttggataaaatcatcaggtgtagcgtcatcatcctctttgagtaagatgcgaacacgttgttcagcatcttgtaatgttttttgtcccacacgagctaaacgaacaccatgttcgaactcattaagggcctcttctaaaggtaattcacctgattctaagcggttaactatttgctcaagttcttgcatcgaagcttcaaaacttggagtttgcgtggtgtcttggttaattgatgtcgtttttttagccataatatttttgatgataaagcatgttagctgaataatagtgatcatcttactacaattgagaagaaaatttcttattcagtcagcgatttttgcgggtgaggcctaaatattggtgatatactttgtgacttttataaactccagtcaattaatatcactgtagtttatgtctctacttaataacctatgaccattgactatgaagtttattattaaattattccccgaaatcacgatcaaaagccaatctgttcgtatacgttttatcaaaattctgaccagtaatattcgcaatgtattaagtacattaggtgatgatatcacggttgttcgccactgggacaacattgtggttgtcagtaaagacgaaagtaaaagcgaagcggtgtgtgatgcgctaactcgtatcccaggtattcatcactttttacaagttgaagagcatagctataccgatttacataatatttttgaacagacctttgctgcctttggtcatttagttgaaaacaaaacgttttgcgtaagagctaaacgccgtggtaaacacagttttacttctaatgaagtagagcgttatgtgggtggtggttttaaccaacacgttgaaagtgcaaaagtaaaattaactcgtccggatgtgaccattaatctagaaattgaagatgataagctgatcctagttaatgctcgctatgaaggtattggtggtttccctattggtacacaagaagatgtattatcacttatctctggtggttatgattctggtgtatcaagttatatgttgatgcgccgcggtagtcgtgttcattactgcttttttaatcttggtggttcagcccacgaaattggcgttaaacaagttgcacattatctttggaaccgctttggacgctctcataaagtacattttgttgccgttgattttgaacccgttgtggcagaaattttagagaaaattgatgatggccagatgggggttgttctgaaacgtatgatggtgcgtgcggcatctcgtgttgctgagcgttatggcgtacaagctattgtaacaggtgaagcattagggcaggtttctagccaaacattaaccaatctacgtttaattgataatgcgacggataccttaattctgcgtcctcttatcacacacgataaagaaaatatcattaatatcgctcgccaaattggtacggaagattttgctcgtactatgccagagttttgtggtgttatctccaagaatcctacagtaaaagcggttaaagccaaaatcgaagctgaagaagaaaaatttgatttttctattctcgatagtgttgttgaaaatgctaagaatatggatattcgccgtattgctgaagagacggtacagcaagtaacagaagttgaaatggtctctgagtttgcaacgaatgacgttgtactggatatccgctctccagaagaacaagaaaactcacctctaaaattagagggtgtagatgttaaagaattaccattttataaattaagtacacaatttggtgatttagataacagcaaaacttatttgctctattgtgagcgaggtatgatgagtcgtttacaagcactatatttacgtgaacaaggctttaataacgtaaaagtgtatcgtaagaagtaatatagttattttttatgaaagtcgtattaataatataatagagatacccccccaataattaggatgctaatatgattttggggggatatattaaaatgcagtgtttattaaaaattattttgaaattcttcagcccttttttccaactctgctaggaatgatgtttttgctaactcgtgtgcattaggtgacataatagcaataatttgatatctatttgggtaaagccaatgttgacaataaactaagtaatgatttgattttctttgtatttgaggcatattttcatgccacttaggttcattaggtattctaatatgtattttagaaatgagagattgacataatttcgcactattttcccatttaccatcagcacctaaataacaagataatactttttttctttccaaagttttaataatttagcgtattcattagcaatagttttattttcaatatcaggatgtattgaaatttcgatcatatttattaatggttattaaatttaggtttacttagacctaactttttatgctctgtttgtattaatctttgcatatcagcacttattatattaggtttcttattagttgtttttgatggttgatgagtttgttctataaatgaaataaactctgttaatacactccgataatgagctaaagaacgaccaaataagagtacactttgttttttttgtgtatcactctttggtaatgaaagaagaatatttttgatatcagttaaagaattatctaaacgttttatacttttgtttatttgataataatcatcttcattaataaaataatgaggaggatttatccatttctcttttaaatgaattaaatgtttattaattgattcggctaaaatattcattttttcagtagcttcatcaatagggatagcaacgaattggttaaattgcgctgaactgaaagaatattggatatccggtgtaaatgatagttggttatgtttgaagctttctgctggcactgaggctaatcccatagaaattaaagtaacaagtttgggtaagttcttgtgatattggagagttttcattatgccttatcctccagaagttattttacattttaacctgttagtatgttttttgaaatcaaaaacaagaaacaaacattgaaataagtcttaaaaatagatttataactattaaataatatgtttattaataagattaggtgttaagtaagagatcctatatatggtatttacctatccccaaacccagtaaattcatcttgataattataaatacctggtggtaatacaagttgtttagcgacatcagctgcaactgctttaccttttaggcgctcaataattttaagtgcgaaatctatagtggtagcaggggcttggctagtaatcagattgactctttcgtcaaagtaaacccgataatcaacccattttttaggttcgattttatcttttaagccggggaaacctgtcatattgcctattggaaagaggttatgagactctaagatgatcgcaggagctgcgcaaatagcggcaactagtctattttcactgtgcatgcggcgtactttttcaacaacaagaggactatctcgtaaggtttctgcacctattaatcctccgggtaaaataatggcatcataatggtgatcaacaacacgaactaatgggacatcagcaattaatttgatccctcgtgagcaggtgatcactaagtcatcaacatcatcttcagcactagcaagtatgaccttaattccagctctaacgagtaaatcagcggtggtaacaacctctgtttcttcactaccattagctagacagatgagtgcggatatggtcataattgccttccttctgttttataaattgaaaaagtcgcttattttcgggtaacacgagtccttgctctgatgccctacgtaatagatagcctgtgatataatcgatttcggtatggcgttgatatttcacatcttgatacatagatgagtaattattagcagtttgctctatggtatcgataatataaccatgtaaatgtgatctagaggtaggtataacaccttctcgctccattacctgataaacttcatcacagactttctggatatgctcagggtattttaataaatcgccattgcgacattgataaaacaccgttaaagggttgataacacaatttacggctaattttagccagctaatagtatgaatatcattgtgccaagctacatccggtaaagcttgatgtaaaatttcagctaaataaccgtattgacgtgctgttgtatttagtgggccaatgtgggtgatcccttctgctgtatggagcactttttgatcttgttgataagcaccatgagtgattataccttgtaatatcgctcttttagtcggtgtttcaggtagggtgagctcatctagtgttcccataccattatggatcagtaaaatcgggcaatcagcagagaggtgagggataagtgcattaaccgcgtctgaaacttgccaagactttaagcaaacaagcagtaactcactgtgttgtagccatgttttttggttggctataatgcgttgttgaaatgggataccattaatggagtcaacgttaacgtcaaaatcaggttgaggtattcttaaccatccttgtacttcatgggcttgttgcgttaatcctgcaatccaaagtttaccaattgaaccacatcctaatacggttattttcatcatttttctcctgctaaatggtaaacaggcgctccatattattcatctaacattaacctaatattattaacagttcggtaattttatcaatgcaaattgagagctatatcaaattataacatcgtttatcttcacttgctgaagctatctctgctttgttatatggaaagtcaagagtaatgacatgagtatggcttttttgctgagtgaaaaacagctattattcaggttgtttttatttattgaggaagaacgaatgccatcttttgatatcgtatctgaagttgacttgcatgaagtgcgcaatgcggtagagaacgcacaacgtgaactgactactcgttgggattttcgtaatgttgaagcaagttttgaattaaacgaaaaaactgagtcagtaaaaacaactagtgtatctgaatttcaggtgcagcagttattagatattctgcgtgagaaaatggcaaaaagagggattgatggtgctgttttaaatatccctgaagagatgactcacagcggaaaaacatacagtgtagaagcgaccttaaaacaaggtattgatactcctttagcgaaaaaaatcgttaaaatgatcaaagacagcaaattaaaagtacaagcacagatccaaggtgagcaagtacgagtaacaggtaaatcacgtgatgatttgcaagctgtgatgaaattagttagagagggtgaattaggtcagcctttccaatttaccaattttcgtgattaatgacgaaagtataaaaaatgcgctgtttggtttattcagcgcatttacagggtatatgaggtttaaacgccgagcactaacgattctaatgtcgctcttggtgtctgcttggtatccactttgatataagcactttgttcgtgtgccataattaccacttcattaacaccaggttgttgcttaaatttctgctctaattgttgttgttgagcatttgataaatgtgacggcaattctatacgtaagctactaacataaggtggttgacgtaatgttaagctaatggcaaaccaaactaagccaatcaataaacatccagcaaagactgcttgagcatcgtaatgttggtagagccatccacctaaaataccacctaatgctacacctagaaattggctggtggaataaatccccattgccgtgcctttataacctgctggtgcttctttactaattaatgaaggtagcagtgcctccataatattaaaaccaataaagaatatctgaatacctaaaataattagccacaagctggttcctgaaatcataaaaatagcttgagcaataatcagcagaaagatacacagtaagaacacttgtttcattttacgttttttttctgcatagataataaagggtaatactgaaataaaggcaatcagcatagtgactagatagacaacccaatgtttctcattaactaatccggcattatgcatgatcaaaggaagtgcgacaaaagcggccatcaataaagtgtgtagtgaaaaaatcccgacattaagctttaataattgcgcatcaaataaaacttttttgacacttcctcgtacaaaacttgattctcgattaagtatatgatgttcgctattcggtacggtaatgagggtgatcataatcccgccgaaagcgagtagggcaatgccccaaaatagaccttgtaagccaaaaatatgtgtgagtattggccctaaaacaagggctaaggcaaacgtaataccaaagctaatgccaataaaggccattgctttggttctattttgttcgcgggtcagatcagataatagagccatcactgcggcagatatagctccagcaccttgtaatgctcgcccgatgataatgccataaatgctgtcacttaaagcagcagtaaggctaccaacaataaaaataattaagccgaaaacaatcattgattttcggccaaatttgtctgagaaaaatccaaaaggaatttggaagattgcttgagttaatccataaataccaatagctaatccaattagcgattctgtcgcatgttgtagttgcagtccgtaggtggttaaaacgggaagtaccataaacatgccaagcatgcgaagagagaaaacagctcctagtccccatgtcgctttgcgctctaatggagtcattttattatcattcatggattacctcgtattactgatacctcattgtaatagtattttgtcacgaggttaatcaataaatgggatacaaaaaaagacaaaattgtactgataaggctgaatgtggcatttaaactaaaaatgccagtcatgattgactggcattagcattttttgcaattgaaattacattatctcagataagcgagaaccgtttctgttgaactggtgggatcaacagacatcattacacttaatgatgtaatggcaatgatagaaaatataaataattttcttgcccacactttatcattggttgctttataaccagataatgccatgcccaaccaccagatactgactgcagaggcaacaatcaggtatttataccctgcatatcccactaaagttagcatcagcgttgcaaccataaaggccagaatatagagaataatatggcgcttagcgactgagatccctttaataacaggtaatacggggatattggctgcttggtagtctttaaaacggaaaatcgcaatggcataagagtgaggcatttgccacaaactaaagataagtaataaaattgctgcacccgcatcaaattcaccgctaacagcacagtagccgattactggtggtgcagagcctgataaactaccgatcagtgtgccataaacagatttacgtttcatatagaggctataaaccccaacataaataataaagccgaatacagcgataaacattgcaagtgggttggctgctacatagagcagcacaacacctgcaatacctaatactgaggcataaataaggctaatttgcgggtcgattaatccttgaactaatggacgattcttcgttctttccatgatacggtcaatatcacggtcaatatagttgttaaaaacacaaccagaagcaacgaccagagacaccccaagtagagtcgcgaaaaatagggggtagtcaatctcgccttttgaggcgagaaggaaaccacctatcacagaaattaaatttccgaaaataattcctggtttggtgacttgtaggtattgcttaatcatagcgacaactcttaatccatcatcatattgatgttcaggttgtacataatccacagtgagccaatcacaacaatgccgataatcaacaaggtgaataggaatgcgataacgttccagcgctcttctgaggacgtgttcatatgtaagaaacagactaaatgaacaacaatctgtacgacggccataccaacgactgtccataagatagttgaggttgtagctgttccttccatcaccatccaaaatgggatcacggtgaggataacggacagaataaagccaatcagataggacttcatgctgccgtggcttgcgcctgaaggagaagtatttggatgactcattacatcgctcccatcagataaactacggtgaacacacagatccagacaacatcaaggaagtgccagaacaggcttaagcaacttaaacgagtgcgattaacatcagttaaaccacggcgtgatacttggatcatcataataataatccaaactaatcccgctgttacgtgcagaccgtgtgttgatactaaggcaaagaatgccgataagaatgcactgcgatctgggccataaccttcagcgataagttcatggaactcatacacttccattaccacgaagcctaaaccgaataagaaggtaacgaatagccacagattgacttggctaacactacctttattcatgctaagcatggcgaaaccaaaagtgatactactaaacagtagtaagaaggtttcaactaaaacaaaaggcaggctaaagatttctttacctgaaggaccatcagcaatcccgttaacaagcaccgcataagtggcgaataagctggcaaacaggataaggtcgctcattagatagatccagaagccgaaaactttcgtcgctcctgcatcgtggtgcccatgatgctcatgggcgtttgcgttatttaaagtttgagttgacattatttcacacctgcttttttcagttcttcataatgcttattctcgatggtttcaatttcaggtacttggacatagtaatcaacatctgtatcgaagcttttcgcgatccaagtgactatcattcctgcgaaaccaacaatcgctaaccaccagatatgccagatcatggcaaagccaaacactaagctaaatgcagagataatgacgcctgctgcggtattttttggcatatggataggttcatattttgcagggcgctgataagcagtacctttttctttctgatcccaccactcatcacgagctttcacttgcggttcaacggcaaagttatagaaaggtgcaggagaagaaattgaccattccagagtacgtccaccccatggatcacctgttaaatcacggtttaagtggcggtcgcggatactgacgtaaatttggataacttggcaaacaataccaagagcaatcagagcggcaccaccagcagcaaccatcagcattgggtggaattctgggttgatattttggcttaaacggcgagtcatacccataaagccaaggatatacagtggcataaaggccataaagaaaccgataaaccagaaccagaatgcgcggataccccatttttcattaagcgtgaagccaaatgctttagggaaccagtaagtcataccagcaaaacaaccgaataccacaccaccgataatgacgttgtggaagtgagcgattaagaacaagctgttatgtaatacaaagtttgcgccaggaaccgctaatagtaccccagtcattccccctactgagaaggtgactaagaaaccgattgtccatagcatagggcttttatactcgatacggccctgatacatggtaaacagccagttaaagattttaacccctgtgggtatagcgatgatcatggtggctataccgaagaaggcattaacgttggcacctgagcccatggtaaagaagtggtgtaaccaaacgataaatgataagacggtgataacaacggtcgcaccgactaaagaggtataaccgaatagacgttttttagagaacgtcgcggtaacttcagagaacacaccaaagactggcagaataagaatataaacttctggatgaccccaagcccaaacaaggttgatgtacatcatcatgttaccgcccatatcattggtaaagaagtgtgtaccaagatagcggtctaacgtcagtagtgtgatagtgacggttaaaattgggaatgcagcgataatcagtacgttagtacataatgcagcccatgagaacactggcattttcatcattgtcatgcctggtgcacgcatacgcaggatagtggcgaagaagttaacccccgtcagaagcgtaccaataccggatatctgtaaactccatatccaatagtcgaccccgaccccaggattgtactccaagcccgaaagtggtgggtaagctaaccaacctgtttgtgcgaattcaccaatacctaaagagatattgataagcagtacaccgacgacaaagaaccagaaactcagtgagtttaggaatgggaatgccacatcacgcgcaccaatttgtaaaggtacaacaaggttcatcagaccgacaacgaaaggtgttgccatgaagaaaatcatgataacgccgtgtgcggtaaaaatctgatcgtagtgatgaggtggtaagaaaccggcttcacccgctgaggcgagtgcctgttggcttctcatcataatggcatcggcaaagccacggaacatcatgaccattgcaacgatgatatacataataccaatttttttatggtcaacactggttaaccattcgctccatagccatttccacttacggaaataggttaaagcgccaacaacagcaagaccgccaagaatgatgccgattagggttacgacaacaatgggttcttgtagcgggattgcatcgagagttaattttccgaacatgcctttattcctctgctcctgcatgtgccgcgtggctcatgttcatattcattgttgcatcagagtgttcagtctgattgctaccggtgtgagcgccatgacctgtatgaccaaatttagagatggtctcttggaataacatcggcttcacgcttgaatagtaggtcactggatttttctggcttggtttagcaagttcatcaaatgcagcggtggtatttaacgtatctgatgactgttttacttttgcaacccatgcatcaaagcctgcacgatcaggtgtcgcaatggcggtaaacttcatgtcagagaaaccgtgtccgctataacttgctgacataccttggtattcacctggttcattagcaattaagtgaagtttggtttgcattccagccatggcatagatttgtccacctaagcgcgggataaagaatgagttcatgacagaatcagaggtaattttgaaattaacaggaacattggttgggaaagccagttcgttaacggttgcaataccttgttctggatagataaataaccatttccagtccattgaaaccacttcaatggtaaccggtttctcatctgaaactagtggtttatagggatcaagttcatgggttgttttccatgtgatggttgccaatatcacgataatgataatcggcacggtccacacgacaagctcaattttatttgagtgagcccaattagggcgataagttgctttagtattggattcacggtagcgataagcgaaaacaatcaccatcagaattaccggtatcacaacaatcaacattaaaccaagcgcaatgaggattaatgttttttgctcagcgccgatagcgcctttgggattcattaacgccatatcgcaaccacttaaaagaacagcggctgctaatagcgagagtgtcccaatactttttatgtatttcataagtctcatccaacgacccaaatgataaaggttctattgttgtttcatcagtatcagtaaggacattttacggtaaggttgcgacagtgtaaacaattgtaatggtaagtaagtgattggttagtcttttgtgttaatgtgatcacaagtaattaaactattaaataaatgttaatttaattattgtgaattaactataatttcataaagtagcatgtttttaaaataaatacatatttttacaaaaaaaattacagcaaaaagtgtaagaaaacgttttttgtctaaaaagtaaacacagtacaggtctgaggagtattagaaagcaaatttcgttttatcttgatgtttcgtatctttatttaatcgctatatgattttttatatcgcagattgattgtttgttgaatatttctattatagaagaaatttttttattaactgctaaaaatgacaaacagcgaataaaaagtgattcgctgtcacaaaaattaacaattagccatcagaagttatattttaagctatagatcacaccatcttgtaaaaagttttctcctaactttttataagcatagcggtattgaatgcctgtagtaatggaagccgtggggtgccaccaaatagcgacagctccattaaagccattttttccgccattgccataccgtttattacgatcaaactccatctcatgccaatttgtgatgctaaatttttgatttaccaggttaaaatcgtaaccggcaacccaaccaaccacatagccattatttcctgaataataagtttgatcgacataatgtaaagctataaaaggtttaaaccagatatctgctaattgtgtgttatacccaataccataaagtgtattaacctcatggaaattaccgccatattcttttccgggcagtgaccaagtaccatatacatggccataaaggtttaatccactgtcagctaaataaatacggctagttcctttgacggtatagcgctgattatcgccgggctgtgtttgtcgattattaaaaggattttctaagtcaaaaaagccataaaactcaccccatgaaaagtgggctcccccttcaagttctaaataagcaaaatcatctttatgggaagtttggcctgttttatgggtggtatgtgtcgtccagtcaagataattgatactgatattagcaaatccaccgagataattagcctgtgcaggtaaagtgcatgttgttgtaataaacaataaaattgattttcttatcataatgtataattagtttttctgttgtattgtttgtggtgtgaattattctcactgtttgttttgatactataatttataaagtgtttttttatagtgttttgtatctaaaatatgatcacattctagaatattgatctgggttttctttatcggaagtttagtattgattagtttgtttttattattttggtatgttaatgaaaagaatatagagtgagagaagaagaataatgatggcaataagttttaattaacagaaatgacgaaggtgaggcgaaatatctcacgacaccataaaaaagggatagtatcatggcagataactgtttttttcttattaattcggaattttattgtgacctcatttgctgatcttcatgcacttcctgctgagcaacttactaatcttaatgagcttggctatttaacgatgactcccgtccaagaagcgtctttacctgctattcttgccgggaaagatgttcgagcccaagcaaaaaccggaagtggcaaaacagcagcttttggcttaggtttattgcaacgtattgatgcaaaacaatttaatactcaatcattagtattatgtccaacacgagaattagctgaccaagtcgctaatgagttacgtcgactggctcgttttctgcctaacattaaaattctgactctgtgtggtggtgtgccttttagcattcaacgggattcattaattcatgctgctcatattattgtcgcgactccggggcgtttgttagatcatttaaacaagcagactgtcacacttgctgatgtaaaaacattggtacttgatgaagcagatagaatgctggatatgggattttttgatgatattagcgacatcatttctcaaatgtcgacacaacgtcaaactttgctcttttctgcaacttggccggatgaaatcgctaaaattagtcgaaaaattcaacaagatcctgtcactattgagattaattcaccggatgaattgccagcggttgaacaacaattttatgagatctcccgttatggcaaattgggattattacaaaagcttttgagtcatcatcaacctaattcttgtgtggtattttgtaataccaaaagagattgccaagatgtgtatgaagctttgaccgaaagcaaccaaagtgtccttgcgttacatggcgatatggagcaaaaagagcgcgaccaaacattgatccgttttgctaatggtagctgtcgagtgttagtcgccacagatgtcgctgcgcgaggcttagatatcaaagcgctagaaatggtgattaattatgaattatcacacgatccggaagttcatatacatcgaattggacgaacagccagagcgggagaaagtggtttagcgattagtttttgcgcaccagaagagatccctcgcgccaatgctctggaagaaatgttgaatataaaactggattggcaatcagccccttcaggtttatcaatcacaccattggttgcgacaatggcaacactatgtattgatggcggtaaaaaagcaaaaatgcgtccaggggacatccttggtgcattaactggagatttagggtttagtggagaagatattggtaagataaatatccatccaactcatgcctatgtagcggtaaaacagtccattgctaaacaggtatggaaaagccttcaacaaggtaaaattaaaggtaaatcagtaaaagtcagactgtttagataatttgttatatcacctattattttctgtttgagcataaagagataacatagaaaaaggacagcctaggctgtccttgaatagatgattgattgaggcaacttaattagctgtttttttcagtgccaagtaatctaaaatagtcccgataattaagctaacggcgccaataatgacaccatataagaagagtgtagaagtaagctcgcttaataattcactattaatagattgtataaaatcaactgactgaaacatctctaaatttggtaacgaattaataataagtaatattaagctacacaaaaatagtaatacggcaaagagtaaaccataaatcgctaaacggtattgtttaataaataatgttcgttgtaaaaattcgccagttttttgcgtataagtgagtgtatttttagcgatcatcagcaaaataataccgggaacagaggcaacaatagagaaaagatagaacgcttcccagccatgggattctacataccagcctgcaacaggaccaacatagacacggccgatagccgctaaggcggaaagaagggcgaattgtgttgctgaaaaagattgatggcatagtgtcattagtagagcaacgaaagccgccgttcccataccaccacaaatattttcgaaagcgattaccgctcccatgctataaatattttgctcagagatagctaaataccaatagccgatatttgaccccccttgcaaaataccaaagatcatcagcgctttgaataaagtccaacggcgcattaataaaccgcctaataaggctccgacaatggttgctgccaatccaagcgttttattgactaatcccacttcacctgcatcaaatccggcgccacgaataaggaatgtggtacttaagcttaacgcaaaggcatctcccattttgtatagcacaataagtagtaaaattaaccatgcattattacgagagaaaaactcatataaaggctctataacggcttcatagagtgtacgtggaggtttgacggcggtttctggctcctgagctaatagcgtggcgataataccaatgcccattaaggcagccattagccagtacatgttttgccagccaatatatttatctgcaagccatagcgccatgcccccagaaaccagcatcgctattcgatagcccagcacagagactgctgcacctgtgcctcgttcatcggcttttaggatatcggttttataggcatcaaagacgatgtcttgtgaggcagaacagaaagcgacgatgacggctaacgaggctaaccaccataaatgatggctagggtttaaaaagcccatacccgcaatacctaacacaagaccgatttgtgttaataacatccatccccggcggcggcctaagaatgaaggtgtatagcgatccataaacggcgaccagaggaatttaaacacgtaagcttggccaaccaatgagaaaaaaccaatcgtttttaaatcgatattttctactgtcatccatgcttgtaaggttcctgctgttaatgcaaggggtaagcccgaagtgaaaccaagtaacagtaaaataaaagatttataccaagtggtctgtttaaaggcggcttgaagcatgcaaaattccttttaacggcttgtttcttgctatctttacaagccgttttttattaattaacgagcgttagatttgatgtattggctgacggaaggatcttttgccatatcactgacaagctcagataaaacattattaatcgctgccgctattttatcattggatgcgccaaatgggccttgtacattgtagctagtacgataggttttagtgtttgtgctaccattaggcatgctgacaacaacggaaatatctgctttagcactaatattatggcgtagacttccttcactaatatctgcgttcagtttatttatcaccacaattacgtcagctgcggctggagagccaaaagtatagccacgtgccatcatctgtttttgaacgatttcttgcattagaaaagctaaatcacgtgtggggactaaaacctctaacttaccattacgactcatttccgctaagtttttcgaaggtcgtttatcttggctggtgatactaagtgtaattgggcgcatagttggatctgatggtggtacagacatcactggctcaatcgataatttattgcttggtgttgcacatcctgccagcattgtgagcgcaaacacggcacaaagtaaattttttatcatgatagtgtctcgattaagtaattctgccgttttctcagcagataagggtggctattttgcctatcataccactgcaaaagcgtagctaatatccctttaatgaacgaaattatctgatttttatcaatgcgttttattgtgataagaacagatttataacttactccatttctcttgttaaggtgagcattttactcaagagaaaaaataagcgattatcataggtaatgtttaagacaagaaagccatttatctgtattactaaaagttatttattcacttaactaacagataacttctttttttgattgttatgttataaggactgagatgatccgtgatgatattgagaataagctgatttcacgcttttctccccattttttgcaagtcattaacgaaagccatcgtcataatgtacctgcaggctcggagagccattttaaagtcgttattgtgagtgacttatttaatgataaacgcagtgtgtcacgtcatcgtgatgtttatcaaacgttatctcatgaattagataatggcgttcatgctttagctctgcacacttttaccttgagcgagtgggatgaacaacaagataaagcattacactctccaggatgtcgtggtggaagccaacaagattaataagaagattgttaatcgtgagtaaatgatgactaagatgcgtattttttgttctttatggggctaaaaagcagtgttaaccttgtttttatgaaaaaattgaggaataaaacggctctttctcgactcaacccctctagatcgttataatgtcgcgtctaattttcagtaaggtttcgggatgcttctgatatcagggatcctcgtttttttaaatgtggcggccccggttctgaaaggagtattaagtctaatactacttgccgtagattagcttcctttaaagtagaccgagcactaaaacttattttgaggtaacaagatgcaagtttctgttgaaacgactcaaggcctagggcgtcgtgtcacaatcaccgtaccagccgctgatatccaaaaagctgtagacagcgaactgaaaaaagctgctaaaactgttcgcattgatggtttccgtaaaggacacgtaccaatgtctatggttaaacaacgttacggtatgtctgttctgaatgatgttctgggtgatctgatgcagcgtaatttcatcaacgctatcatcgaaaacaaagttaacccagtaggtgcacctgattacaaaccagagcaatacaaagaaggtgaagactttgtatactctgtagaattcgaagttttcccagaaatcgaactgaaagatctggaaagcattgaagtggtaaaacctatcgtgacagttaaagacgaagacgttgataacatgttagaaactctgcgtaaacaacaagccgagtggaaagataaagaaggtgaagttgcggcagaagatcgtgtaactgttgattttaatggttctattgacggtgaagaatttgaaggcggaaaagctgaagatttcgtactagcaatgggccaaggccgtatgatcccaggttttgaagaaggtcttatcggtcataaagcaggtgaagaattcactatcgatgtgactttcccagaagattaccacgctgaaaacctaaaaggtaaaaaagcacaatttgctatcaacctgaaaaaagtggaagagcgtgaactgccagaattaactgaagagttcatcaaacgcttcggtattgcagatggttcagttgatggtttacgtgccgaagtacgtaaaaacatggaacgtgagttgaaaaatgcgatccgtacacgtgttaaatcacaagttatcgatggcttagtgaaagctaacgaagttgacgtacctgcagctgcggtagatagcgaaattgaagttctgcaacgtcaagcagcacaacgtttcggtggtgatgaaaaacaagctctgcaattaccacgtgaattgttcgaagaacaagcaaaacgtcgtgttatcgttggattactgttaggtgaagtgatcaatagtaatgaactgaaagcagaagacgagcgtgtgaaagcgttgatcgacgaaatggcttcagcttatgaagatccatcagaagttgttgagttctacaataagaacgaacaactgatgaataacatccgtaatttagcattagaagagcaagcggtagaaaaaatcttagcaactgctaaagtaacggaaaaagaaactaacttcactgaactaatgaacgaagttcagatgggttaatttttaaccgcgatatcggttttaagcaaaaacccgtggtaaaaaccacgggtttttttcagtttgtgtatatttatcaaattttgtcttgaaatttgagcgattatctccagataattctatagtcattttatcactcctcgcgaggcgccttgaatgtcttgtgagagattggatcatttgcaatggtcatgatcaattatctcaagtaaaattgttgtcattggcaccaataagaatgcaataggagacagatatgtcatttaacgacacccaggaacaattcgcacctaatatggctttggtgccgatggttatagagcagacttcacgaggtgagcgctcttacgatatttattcacgtttattaaaagaacgtatcattttcctgactggccaagttgaagatcatatggccaatctcattgttgctcagatgttgtttttagaagctgagaacccagaaaaagatattaacctgtacattaattcaccgggtggtgtgatcactgcaggtatgtcgatttatgacacaatgcaatatatcaaagcggatgttagcactatttgtatgggacaagcttgttcaatgggtgcatttttattatctgcaggtgcaaaaggtaaacgtatttgtctacctaactcacgtgtcatgatccaccagcctttaggtggataccaaggccaagcgacagatattcaaatccacgctcaagaaattttgaaagtgaaatcgcgtatgaatgagttaatggctcaacatacggggaaatctattgaagaaatagaaagagatactgagcgtgatcgtttcttatccgctaacgaagcgttagaatatggtttagttgataaagtttatacacaacgcagctagtcatattccgttgtaatagctatggagttaacaggttttctttgttatagattgatataaagaaagctgctattaatctctagataaaaaagtctttcttcctcttattcgctgataagaggaataactaagtgaggttaactgatgacagataagcgcaaagatagctctgggaagcttctgtattgctctttctgcggtaaaagccagcatgaagtaaagaaattaatcgctggcccgtcggtttatatttgtgatgaatgtgtcgacctttgtgttgatattattcgtgaagaaataaaagaattagcacctcatcatgaacgcagtgaattgccaacgccacatgaaatccgtaaacatcttgatgattatgttatcggtcaggagctggcgaaaaaagtattggcagttgccgtttataatcactataaacgtctgcgtaatggcgataaagccgatggtgttgagctagggaaaagtaatatcctgctgattggcccgacaggtagtggtaaaacattattagcagaaacgttagcacgttatcttgatgtaccttttaccatggccgatgcgacaacgctaacagaagcgggctatgtaggggaagatgttgaaaacatcattcaaaaactactacaaaaatgcgattacgatgtgcaaaaagcacaacgtggtattgtttatattgatgaaattgacaagatcactcgtaaatctgaaaacccatcaattacacgtgatgtttctggcgaaggtgtacagcaagcattattgaaattagttgaagggacagtagcttccgtacctcctcaaggcggacgtaaacatccacagcaagaattcttacaagtagatacttcgaagatcctctttatttgtggtggtgcttttgccggactggataaagtagttgctcaacgtctaaatacccattcaggtattggttttggtgcagaagtgaaaagccaaaatgagaaagcgagtgaaggggagttattagcgcaagttgaaccagaagatctgattaaatttggtctgatccctgaatttattggtcgtttgcctgttgttgcaacattaggtgagctcaatgaagatgcgttaattcaaattctgcaagagcctaaaaatgccctgactaaacagtatcaagcattgtttaaattagaaggtgtagatttagagttccgtaaagatgcgttaaccgcgattgctaaaaaagcgatgtcgcgtaagacaggggcgcgtggtttacgttccattgtagaagctgcattacttgatacaatgtacgatcttccttcatttgaaaatgcagagaaagtggtcattgatgaaaatgtaatcaatgggaaatctgaaccgctgattatatatagtcaacctgaaaatcaggcatcgggtgaataatatagcgaaaatcagcaatacctcttgtctgatattatctattttctcccttttagggcaaaaaaataggataacgcgtgccaacgcaataaaaatgagggaattttccctcattttgtttttttaatagggaatgctattgaatgtcggaaaactgcccttatatattttgacaatccgtagaattaattttatttggtgagatgcgaataaaattacctgtaaaagcgttaagctaaaaacgaagagagagctctatgaatcctgagcgtccagaacgtattgaaatacctgtattgccattacgtgatgtcgttgtatatccacatatggtgatcccgttgtttgttggtcgtgaaaaatctattcattgcttagaagctgcgatgaacgacaacaaacaaattatgctggttgcgcagaaagatgcatctactgacgaaccaggtgttaatgatcttttttctgtggggacagtggcttctgttttacagatgctgaaactgcctgacggaaccgtaaaagtgcttgttgaaggtattcgccgcgcaaaaattaccacattatctgataatggtgagtatttccaagctaaagcggaatatctagacacgcccgttgttgatgagcgtgaacaagaggtactaaatcgcacggcgatcaatcagtttgaaggttatatcaagctgaataaaaaaattccgccagaggtattagcctcattgcatgcgattgaagaatctgcgaagttagctgataccattgcttcgcatatgcctttgaaattaaaagataagcaagctgtgcttgaaatgtctgatgtaacagaacgcctagagtatttaatggcgatgatggaatcagaaatcgatctgctacaagttgaaaaacgcattcgtaaccgcgttaaaaagcagatggagaaaagccagcgcgagtactacctcaatgagcagatgaaagcgatccaaaaagaattaggtgagatggatgatgcacctgatgaaatggagtcgttaaaacgcaaaattgaagcggcgaaaatgcccaaagaggcgagagaaaagacagaagctgaacttcagaaattaaaaatgatgtcgccaatgtctgctgaggcaacagtagtccgtagctatattgattggatggtacaagttccttggaatagccgtagcaaagtgaaaaaagacttagtgaaagcgcaggaagtacttgatacggatcattatggcttagaacgtgtgaaagagcgtattcttgaatatctcgcggttcagtctcgtgtcagcaaaattaaagggccaatcctgtgtttagtagggcctcctggggtaggtaaaacatcactaggtcaatctatcgcgaaagcgacagggcgtaaatatgtgcgtatggcattaggtggggtgcgtgatgaagctgaaatccgtggtcaccgtcgtacttacattggatcgatgcctggtaagttaatccaaaaaatggccaaagttggtgttaaaaacccgctatttttattagatgaaatcgacaagatgtcatcagatatgcgcggtgatccagcttcagcactgttagaggtgttagatccagaacaaaatattgcctttaatgaccactatcttgaagtggactacgacttatccgatgttatgtttgtggcgacatctaactccatgaacattccggcgccattactcgatcgtatggaagtgatccgcttatcgggttataccgaagatgaaaaactcaacattgcaaaacagcatctgttaccaaaacagattgaacgtaatgcactgaaagagaatgagctaacaatccacgatagcgcgattatgggcattattcgctattatacgcgtgaagcgggtgtacgtagcttagagcgtgaaatttctaaattatgtcgtaaagcggttaaacaactgctgatggatagtactatcaagcatattgaaatcgatgaaaataatctgaaagattatttaggtgtacgtaaagtcgattatggtcgtgctgatacagaaaatcgtattggtatggtaacagggcttgcttggacagaagttggtggtgacttactgacgattgaaacggcaagtgtaccgggtaaaggtaaactgaccttcactggctcgttaggtgaagttatgcaagagtcgattcaagcagcgatgactgtggttcgtgctcgagctgacaaactgggcattaatggcgacttctatgaaaaacgtgatattcatgtacacgtaccagaaggcgcgacgccaaaagatggtccaagtgcgggtattgcaatgtgtaccgcgttggtttccagtttaacgggtaatccagttcgttcagatgttgcaatgacgggtgaaattaccttacgtggtcaagtattgccaatcggtggattaaaagaaaagttacttgcggcacatcgtggcggaattaagacagttcttatccctgatgaaaataaacgtgatttagaagaaattcctgaaaacattgttgctgatctggatattcacccagtgaaaacaattgaggaagttttaacgttagccctagagaaatcgccatttggcatcgaagtagtgactaacaaataacactaaatcgtgatgtgaatcataatatttcactaaaaaaaaggctggataagcaataaaagcttgccagtctttttttgtgtcgttaatttaatggggtttattaattaatagtcctgttttatcagtcttgctatatataaaaaggcttgatataacgacgtttgcaaaatttgccattaatggtaaaaaataacgcataaattatggggatgaaaagcgtgaataaaactcaactgatcgacaaaattgctgcgaatgcagatatcactaaagcggcagcgggtcgtgttgtagatgcaatggtagcttcaatcactgaatctttacaaaaaggtgatgacgttgcattagtgggcttcggtacatttaccgtacgtgatcgcgcagcacgtactggccgtaatccacaaacaggtaaagagattcaaattgctgctgccaaagtgcctgcattccgtgcgggtaaaggtctaaaagacgcagtaaatcaataattgagtaaatcgtttttctgcctaatgtgttattgggttgacgttatggataaacagaaaacgaatcgattaagaaataaagcgcatctttaaaggatgcgcttttcttttttaccacagaaaaggggattaaaccgagtattctctggtgataagacgtgaaactaaagtagtcatttgatagaatagcgcgttgttctataactgaaatagacaacatgagagcatctcatggttagctaaagacttaactgaccaatgagtcaattagagctgtttattttgtatctgtaagatgtgtgttaagactcaaattttatacgggattggctatttctaaggattgtcgcgtgttgcgacattttgatattaagccagcgatgagcatgttaaattagctgtgctcaaaatagtcgtgtaacaccaataaaaaataattttttcaccaaacggagcctagtctcgttatgatggacaacattcgttcaactgctaataatccttttattaagatactattagctgtgatcatcctctctttcgtcctaactggtgtgggcggatatctctttagttctggtgttaatgatgccgctgaagttaacggttataaaataagtcgtgctcagttagagcaagcttatcaacaacgccgagcacaactacaaaaagatatgggtgacaattttgcttccctcgcatcatcagatgagggacaaaaaatgatccgccaacaagcattgaatgtgctgattaaccaagctttgctggatcaatttgctcaagagttaggtatttctgctggcgaccagcaaatcagagacgcgatttttgcgctaccttatttccaaactgatggtaaatttgataacaaaaaatacgttgagttattaacggcgaataatattgacgcggatgcctttgctgaaggaattcgtcaaaatctgattaatcaacaattacgttattctattcaaggcactgactttgctttagagagcgaagttaaagactttgccggcttaatgctacaaagccgtaatgtgcgtctcgcttcattagatattcagccattccttgaaaaagagacggtatcagatgaagaattaaaagccttttatgaccaaaatacctctatgtttatcgctccagcacaagttaaagtgagctatattcagttagaagcccaaaaagatttaagcaacatcactatttcagatgatgaagttaaagcttattacgatagtaatatcagtgaatttactgttcccggacaaaaaaaatacagtctacttgtcttagcagatgaaaccgctgcgaaagaagctgaagatgcgttgaaaaatggcgctgacttcgtcaccttagtaaaagaaaaatccattgatactttttctgctaaacaagatggttcattaggctggatcactattggtcaagagctaccagaattagcaaatgcgagtttgactgagaaggggcaaatttcacagccagttaaaatcagcaacggttatgctattttccgtcttgatgatattaaaccttcggtggtaaaaccttttgatgacattaaagctgacttattagtaaaaatgcgtgaaaacaaagccattgatgatttcttcgcattgcagcaaaaagtgagtcaagccgcttcaaatgataacgacacgctagcgacagcagcaaaagcagggaacgtcactgtaatcaatacagattggtttgatgaaaacaatgtaccagcagccttgaataacgaaaagttaacacagcttatctttggtggttcactggttgatgacaatggccctacaggcatgaactcagatatggttacccttggtaatgatagtgcttatattgttcgtgtcgaaggatataaacctgcatcaacccaaccattagataaagtacgtgacaaggttattacactggtcaaacagcaaaaagcttctcaagcgatgaatgcgcaagctcagaaactccttgcagccttaaaagaaggtaaaggagaggcggcattgaaagaagcaaatatctcgtttggtgaggtagaaagcgtggttcattcatcagccacagatccgatacaaagtgctatttttgctatgccaaaaccagcagaaggtaaaaaagagtacggtatgtctaatgtaccgggttcaaaagtggtcttaatccaattagatagtgtcactgatggtaagccaacggcagaacagcttgaatttatgactaatctctatcgcgcccaaatgggagaagaagctttacaacttatgctcagcgatttaagagaaaaagcaaaaatcgagatttttgataaagattatcaataaactatcttagattgattgaataaaaacccagtttcgactgggtttttttatggctaaaattatattcaagattagaaattgcgagcagtcacgtcattttttgtaacgctatttttttattcaatttatttttcttactctctcgtaattcatatggttgctaattgctgaattatttaaggcttggcattatttgatggcattcagtaatcgctgtttgctgttgaatatacagttatttttacaaaaaggagatgattaaaatggataaaaaaacactatcagcatttatggcatcaatatgtttaacattaggtttagggttatcaccactctcttatgccgatgatatatcgccttcaacatcaaccatgttgattgaaaaaggggatcaaaaagagagtgctgtcagtgaggtaaacgctagtgcacaaggaaagttggatattaatagtgcaacacttgatgaattaatgacgctaaaagggatcggaaaagcaaaagcgcaagccattatcgattatcgagaaaaagtggggcgttttgcttcttttgatgatctcgccaaggtctttggtattggtatgaagcttattgaacaaaataaagatctaattattatcaactaattactcgataatactgtaccccttttttgtgatcaaaaaggggtacagaattgcctttatataatattaataatcagatggtattttaatttgggtaataaataatcggatgaaatataccctatttgatatttttgactatatttaagatattacatagaaatttctcttagctaaagtttgttagggatatcaagaggtaataaagtcatatgagtacattaattaaagtttatggattccatttagatgtttttgagcatgtgaataatgcacgttaccttgaatttttagaacaagcgagatgggattggattgaacaacacttagatctcgcttggtttaaacggcatggtctagcactcgttgtcgcgaatattaatatcaactatcgtttgcctgctaatttaggcgatgaactaatcattagttgtgatattgcagaagtcggtattaaaagtggcgtgttgtctcaaaaaatagtgagaaaacaagatggtgcattgatttcagatgcattagtgacttttgtactcgttgatatcaatactaaaaaagcattaacacttacagatcagttacgagaaaaattggagtatgtacgccagtctgctgattagcattgatgttatccggtcaaccgtctaattttatcggtactcgtaacatattagcggcaggatataccgtgcttgcctgtggaaagggggagtagtcagcccactcgctgaagcaggaagccaccgaggtgagtcagacggtggtctgaacgctgtagggagccacgtcctttagggcatggaggaggtcaattggttttggtatagaataattccccgctctgttgttttcagggcggagaaaatcacaggggaaaactgggtaaaacaactggttaattagttatcacggcttcgacgactttattagcaacctaacaggccgcgaattaaaaataactgctacgggtgtaaacgcacagaaaacaaagctaacacatttttgacagattatttaaggccaactttatttttcatggcgtccatgacggcatttttgtcttgtaaatagccatgaagtccacgctctcttaaatggcaagcggcacattgaccacaaccatcaccttgaataccgttataacaagttaaggtgttgtggcgtacaaaatctaacttaccgtaatagtcagcgagtgcccaagtttgcgctttatctaaccacattaacggagtgataaactgaatatcacgagcaatacctaaatttaccgcatgatttagagctttaacaaactcatcgcgacaatctggataacctgagaaatcagtttcacatacgccagtaataacgctttcagcaccaatctgataagcataaatggcggctaatgtaagaaatagaatatttctaccaggtacaaaggtactaggaatatcgctttgttcactctgtttaaaatcaggcacaggaatattgtcacgtgttaagctgctgatagcgagttcattgagtaaactgacatccaaaactttatgtgcggttgcacctaataattgactgactctttgtgctacctcaatttcttctttatgacgttgtccataattaaatgtaatacaatgaacttcatcatactgctctagtgcttggattaggcaggttgtcgaatcttgtccaccactaaagacaacgaccgtttttttcatcagaatactcctgaatattgatattttttaaggattaatacgcataatattgcagatattatgacaagttatcaccaaattatcagtaagagattattcttatagcaggggtagataattactattttttgtaggggcatatgttaaaggagtatttatgttagataagattgaccgaaaactattaacgctattacaggaagattcaagcctctcactgaatactttggcagaggcggttaacctaacctcaacaccttgctggaaacgattgaaaagactcgaggatgaagggtatattcgtaaacgtgttgcattactcgacagcgaaaaaattgggcttggcttaacagttattgttatgataagaacacagcaacataatagcgagtggtatgaacaatttgtatcattcgttaagcaaatgccagaagtactgacattctatcgaatggcgggtgagtgtgattatctaatgcatgttgaagttgtagacatgaaaagttatgaccaattttacaaacgcatggttaacggcgttcctgggcttattgacgtaacttctaactttgcaatggaaaaaattaaatacacaacggcaatgccgatacctgaataagatccctctttaccaactggcacttttattttttgtacaaccttaggatttaaggcgtggctctattttcacagctcagttggtattttatcagcgaatggcgtcgttatgtcggtgctattttcttattgatggttatcgccgttctacaagtgatccctccgaaaatcgtcgggattattgttgatggtgttgatagccatagcctgtcttttcagcaaattatggggtggatcgggatcatggtattgatcgcccttgctgtctatttattacgttatatttggcgtctgtggttatttggtgcttcttaccaactggcggtgaaattacgtatgcaaatctatcgccaacttagtcttcaatcatcggctttttatcaacgctatcgcacgggtgatttaatcgcacgtaccactaatgatgttgataaagtcgtttttgccgcaggggaaggggtgttaacccttgttgactctatggtaatgggacttgcggtgttagtgatgatgagtattcagttaagttggcaattgacacttatctcattgttacctatgccattaatggcgatattaattaaacgctatggcgataaactacatcaccgctttaaaagtgcacaagcactattttcttcattgaataatcaagcgcaagaaagtttaagtagcattcgtatgatcaaatctttcggtcttgaacagcaacatgcttcacgttttgaaacggttgcaaaagagacgggtcgacaaaatatgcgagtggcaaaagtcgatgcattgtttgaccccacgatttttatggcaattggttttgctaacttacttgctgtggcgggaggaagttattttgttctcaatggcacgatgacattgggagaattaaccagttttgtaatgtatttagggcaaatgatttggcctatgttagcgctggcatggatgtttaatattgttgagcgtggtagtgcggcttatagcaggatcaatgcattactcaatgagcaaccggctatggttgatggtcaactatcactaatgcatcaaaaaggaactttagcggtagatattaaagcgtttcattaccccaaacagcaagttgatgtactaaaaaacattcattttacactctctcctggtgagatgttgggtatttgcggtatgactggggcggggaaaagcactttgttagcgctgatccagcgcttatatgatgtcagtgaaggggatattcgttttcaatctgtccccctttaccaattaaaattggatgaatggcggggaagacttgctgttgtcaaccaaacaccgtttcttttttcggatacgattgccggaaatatagccttaggacgccctgatgctaccaaagaagagatagaggcagtagccaaaatcgccaatattcacgatgatattttaaatttacccgaaggatatctgactcaagttggtgaaaaaggggtcatgctctcggggggacaaaagcaacgtatttccattgctagagctttactgttagatgcggaaatcttgttattagatgatgcgttatcagccgttgatggacaaactgaataccagatcttacaaaatctggctcaatggcgtaaagagaaaaccattattattagtgctcaccgtttatctgcactggttgatgcaacaaatatattggtattaaaacaaggcgaaatcatagagcaaggtactcatcaaacacttattgcagtgccaggttggtatcaagatatgtaccattatcaacaactcgaggccgcattagatgacgataaataataataaatccattaaaacgttattgccggccttaaaaagattattagcttatggcaaaacctatcgcaaaccgatgacattaggtgtggtgatgttatgggtggcagcgattgcagaagtgggtggacctttacttattagttattttattgatgctaaagtagcgactcatcaagttgaatggcgaggcgcattaggtcttgctgctgcttttattctattacaaattattgcggcactattgcactattaccaaacaatcgtctttaattatgccgctgttggggtggtacaacagttacgagcagatgtgatgagtgctgcgctaaaacagccattaagtgcatttgataatcagcctgtaggacagctgatttctcgtgttaccaatgatacagaaactatcaaagatctatttgttaacgtctttcctgctctatttcgtgctatagcattggtggttgtgatgttaatcgctatgtttctactcgaatggcaaatggcattagtggcgatgacgattttccctgcggttattggtgtgatgatgctttatcaacggctaagtacaccgattgtccgcaatgtgcgtcattatcttgccaatattaatgatggctttcatgaagtgattaatggtatgtcggttatccagcaatttcgtcaacaagctcgcttcggtaagaaaatgtcagatgatagctggcaacattatcaagcacgaatgaaagcactaaaacttgacgggttattattgcgcccgttactcagtatgctctctgcattggtgctatgtggcttattgatactgtttggatatcaaggtagtgctgtgattggtgttggagtaatttatgcttttatcagctatttaggtcgtcttaatgaacctcttattactctgacgtctcaacaatctttattacaacaagcggttgtttccggtgaacgagtctttgagttaatggacgccccgatgcagcaatatggcaatgcaagctataccattaaccaaggagatatagccattaacggcttgtggtttgcgtatctaaaacagcagtgggtattaaaagagattaatcttgatatacctgctcgccactttgtcgcttttgtggggcatactggcagtggaaaaagtaccttagccagtttgcttatgggaaattatccatggcagaaaggacatatctacttagataaccatccattagagtgctattcccatcaggcattaagaagcggtattgcgatggtacagcaagatcctgttttattatcaggtactttgcgtgacaatattactttagggcgtcactgctctgaagctcacttatggcaagtattagcaactgtacaattaaatagctgggtaaaaacattacctgatggtttagaaacccccttaggtgaacagggtagtcgcttatccgcgggacaaaaacagttattagcattagctcgagtattattatttccaccccgtattcttatcttagatgaggcaacggcaaatatcgactcgggtacagagcaagctgttcaaaaagcccttacggaaataagagaaaaaaccacattaattgttatcgctcatcgcctttcaaccattatcgatgctgacgaaattgtagtgcttcatcgtggtgagattgttgagcaaggtaaacatgcacaactattggcacaaaaaggtcgctattacaatatgtaccaattacaacaagttaaagagtcattacaagttcaagagccagccgttgttgagtgatattatctaaattccattcatcctaacccagccaatgctgggttttttattgcctcactttttgccccaatttttagcattgtggacatgataagagcatttattgcactaagttagtgagtgatatttattttttatttatttatcaatgaaataagtattggcatatctcttgctctatcagtatggcgctttctaaaaccgtatggagcaattatatgaaatatatcatcgcgattattaaaccatttaaattagaagatgtaagagagtcactctctgagcttgggattaatggaatgacaatcagtgaagtaaaaggatatgggcgacaaaaaggacatgccgagctttatcggggagctgagtatgaggttaactttcttcctaaagtaaaaatagaattagcggtttgtgatgggcaattagagcctgtgctacaagccataagccaagttactgatactggtaaagtaggagatggcaaaatttttgttttagagttattgcaggcgatccgtattcgtacaggagagtctggtgaagaagccttgtagaggagctaacaaatgaaacgatttattagttatttttttacgttagcacttacatactttttattacctcagttagctattggagccaccacaatagacatagataaagcggacaacagttttatgctgatctgtagtgcattggtgttttttatgactattcccggtatcgcactcttttatggcgggttactacgcagtaagaatgtattatcactaatgacgcaagtgatgttgattttcagtgtagtgattatcctttggattatgtttggctatagtttggcgtttactgctggaaataagatttggggtgggtggtcacttacttttctcaataatatttcagtcgattctgttgctggtgaaattaatcaatatgtgcatgttgtatttcaaggctcttttgcggtgatcaccgtggccctgattgttggcgcattaggtgaacgtattcgtttttcagcactgcttatctttactgttatttggtttactttttcatatattcccattgcccatatggtatggggagaaggtggttggcttatcgatgatggagcattagattttgcgggagggacggttgtccatattaatgccgctgtagcagcgcttgttggtgcttacttactaggtaaacgaggtgattatcaacatactgcgattaaaccacataatttacctatggtctttactggtacagcggtactttatattggttggtttggttttaatgcaggctctgcagggagcgctaatggtattgctgcattggcgtttttaaatacagttgtagctaccgcaggtgcagttcttgcgtggacatttgctgaatggctagtgagaaggaaaccttctatgttaggtagttgttcaggatgtattgcgggattagttgctattaccccagccgcgggaaccgtaggccctattggtgctttggttattggtattattgctggcatcatcgggctttggggggttgtggttcttaaacgttggttaaaagcagatgatgtctgtgatgtttttggtattcatggtacttgtggtattgcgggctgtttattaacgggcatatttacggcttcatttttagggggcattggttatagcgagcatatgacgttaggtaagcaagtgctaactcaattatttagtgttgtgattacgcttatttggtcaagtgttgtggcttacattgcctttaaaatcgccgataagctagtgggattgcgtgtctcacaagaagaagagcatgatggattagatataaccactcatggagaaagagcgtacgagcagtaatggtctattccccctcaactgaggggggaatattctcactgcgttatttgtttgattttattcgtttttggcggataacaccttcttgaacagaagaggcaactagttgcccactcatattaaacatttttcctctcacaaatccgcgaccacctgaggctgatggactttcaatagcataaagtaaccagtcatcaacacgaaatgggcgatggaaccacatggaatgatcgatggtagccacttgtaaactcggatccataaaacctaaaccataaggttgcagtgaggtgggtaaaaaatcaaaatcagagatataacctaataagtattggtgtaggaaaggatcagatggcatttctccgcgactacgataccaaacataacgttccgcaggtgctttctcataaccaaacgggctaaaatattgcacggggcgtgcttcaaaaggtgtttctcttaatgcgagtgttcttagaggttcgggtaattttggggcaagttttttcaatatctcatcttgagagatcaagtcatttggaaaagggacttcaggcatcatatcttgatgttcaaagccttcttcaaactcttggaaagagacggtcatataaaaaataggcttaccttgttgaatagcactgacgcgacgagtactaaatgagccaccatcacggatagattccacatcgtaaacaataggcttatggctatcaccaggtcgtaaaaaatagctgtgaaatgaattaacatagcgattatcagcaattgtttgttttgccgcataaagagcttggccaacaacttgtccaccaaagacttgtggtaaacctaaatcttcactttgacctctaaataggccttcttctattttttcaagctccattaagttgataagtttttttaatgcctggctcatagtttacctatatatcatcggatagattatgttttatagttttgattatatacaatccgctatcggataaaaaaataatctgctgtttatattttgctaaaaatgccgtaacaccttatttgataggggagcaatcgcgatattagctaaatagagggcataaattgaaagaatttggcaaagcataaggccttattgagtaatttatcagcacttggtctggctttccttgctatttggatagctttaaaagataatgcatatcgtcttagcaataagacaatctatgggggcttgttggttctcccgcaacactaacttgttaactcggtcaggtccggaaggaagcagccatggcaggtgtcgtgtgtgccgggatgtcgctggcaaggccccacccaatttctgcattgcaatcccgctattttttatccagttactttcttcatcgtaatcgtatcgttgaacgtttgcatctaaacatatttctatttacatattgtttaattaatagtttttttaactatatttactctcaatatgggtttggtgaattaataagaaacagaatacctttcacctattatcgccttcgcgttatagatgaataataagagaagttgtaagaattatgccgtcatgccgttataagcacggcatgatagtgtgtaatcattttacttattaaaaaagcatgaataaaacgatacctaaaaataagaactattaacccaattactataaagagatagtaaaaataagaggatactaatggttacttgctaatacgattatcttacaaatttccaaacagatgctgggatcttgtcataaagtttgttcatggttagctctgctaaacgatggtctgcagctgaataaaatagctctaactcatcatcggtcagttcatatttgttcttttcaatcactctttcaagggtttcgattgaggtgcattttcttaaacgcattagatagtctgttttagtcatgttgtcttttctctataatttaaataaaactaaaggtaatttaatttacttgatataacttttaggatttttatcgataagcgttaacagtgaatagtttaactctttccaattattcaattccgagtaggaaatggagtcactaccgaataaccgataagtctcttctatgcactcttccattaaagtgttaatagcgtgtttatcaggatattttatcttaaacagccaactaaagcccataatgtgatcaattagggcattaaggtcaacgctttttgtgctacttagatcattgttccaaactgcggtacctttatctaatgagcttaatgcttgctgtaatagctcttcacataaaaatgacaattcagctaaatctattttttctggtgaatattcgtccatagcttattgtgactgaattatgctaaagaaacactaataattaatactgataaattagctattaatgaagcttgcggcttaattcagtaatgaattaattaaacaatcttaaaataaacagcaactttatattttattcatataccaataatgtttaataattgtttttattatttctacatagtaatggtgtaatttgaaaaaggtatttaaatacgaaactacattcaatgcaagttgaaaaagtgtacaaaataaaagtactgtacgcttaatatagcactattattgcataagtcactatctgagcgatagaaatttgtctattttcgtaaaaatttagttgagaagcgtaaaagtaaggataattaacttgatgattatcctagtatttgtttgctaaaaatgtcttatatcgctaaatagtcttggtgataagctgatattaataaaaaatagtgcgttaaatttgacaaaaagtcatatataagaaaaaaattaaactgatttattgattagggatatgtttttctttaattgataacaatataaaggggcgggattaacacgaaaaattaaaataaaacaaaaaggccgctaagcgacctttttgatgggtagccaacaaattatgttggctgtggtatagcataatgattacttagtttggtgcggatagtttgggtgctctaagtcttcgtttttcttcgcaaaccttctgcggatcacaacgaagaaaataggaacaaagtaaatagcaagggatgtcgcggcaatcataccaccgaatacccctgtacctactgagttttgcgcaccggagcctgcaccgttacttaataccagaggaataaccccaagcataaaggctaacgatgtcattagaattggacgtagacgcattctaacggagtctaacgtcgcttctactagccctttaccctctttttccattaagtctttggcgaattcgacaatcaatatggcgttcttcgccgataacccaatggtggtaagtagcccaaccttaaagtaaacgtcgttttcaagccctctcaatgtagtaaatgctaatgcaccaatgacccctaaaggtacgactaacataactgagaaaggcactgaccaactctcatagagtgccgccaaacaaaggaatactacaattaatgaaatagtatacagtgctggcgcttggttacctgatagacgttcttggtatgacatacccgtccactcgtagccaataccacttggtaatttgctggcgagttgttccatcattagcattgcatcaccactactttgtcctggtgttgcactaccttggatctggacagctggtaaaccattataacgctctaaacgtggtgagccatataaccaaggatctttactagtatcaatgaaggatgagaaaggcaccatctgacccgcattgttacgaacataaagattagcaatatcttgtggcaacatgcggaattgtgattctgcttgaacgtaaactttcttcacacgaccacggtcgataaagtcgttaacgtagctaccaccaaacatcgtacctaatgttgagtagatatcactgaccgcaacaccttgagcttgtgctttttctaagtcgatataaagacgatactgagaggtatcttcttgaccgttaggacgcacacccgtcaacatttgtggctcttgtgctgccattccaagcaattggtttcttgcttccatgagtttttcgtgtcccaggttggcattatcgattaactcgaattcaaaaccacctgcagagcctaactcaacaatcgctggaatattaaaggagtaaacaaaggcttctttaatttgagaaagagcttggttagcacgaccgacaatagcagggactttgtcttggtctgatttacgctcatcccaatcatttaatacgacgaaagcaagccccatgttttgaccttgaccaccaaaaccaaagccgctgacggtaaagaccgacttaaccacatctttttctttagtattaaagtagtcattgacttgtgctaatacgtcttgagtttgctcttgggttgatccagcgggcaactgaaccattgtcagtaataccccttggtcttcttctggtaagaaagacgccggtaaacgcacaaacataattgccatagcagcaacaagtaagacgtagatcagtaagtaacgacctgtaccacgcagtgtacgagaaacactgtctgtatagtggtgactacttttttcaaaaacgcggttaaaccaaccaaagaaacctgtttgtacaccatggctgcctttcgggattggttttaacaatgttgcacaaagtgcaggggttaaaatcaatgccacgaaaacagacagcaccatcgctgatacaatagtaactgagaactgtcggtaaatcgcacccgttgaaccaccaaagaatgccattggaataaataccgcagataacacgagggcaatacccaccaatgcaccttggatttgtcccatagacttacgtgtcgcttctttaggtgacagtccttcctcttgcatcacacgttcaacgttttctactacaacgatagcatcatcaaccagtagaccgatggctagtaccatcgcgaacatcgtcaaggtgtttatcgaatagccaaacgcggacaatatggcgaaagtccctaataatacgacgggcacagcaatggttgggattaatgtagcacggaagttctgtaagaacagatacatgactacaaacaccagcataatggcttcaacgagcgttttaaccacttcaaaaatagagatcttaacaaatggtgttgtatcgtaaggataaacgacctctaatccagaagggaagaatggctccatatcagcaagtgccgcacgtactgctgttgcggtatcaagggcgttagcacctgttgccagtttaataccaatacctgctgcaggtaagccattaaagcgagcaatcgtgctgtagttttcagcccccatctcaacaatacccagatcttttagcttaacctgtgaaccgtcttgattgactttcatcagaatatcagcaaattgctcaggtgtattaagtcgagtttgcgcaatgatagatacatttaaacgctgaccaggcactggtggcgtaccacctaattgacctgccgccacttggttattttgcgatttaatcgcattaataacatcaagtgtggtcatgttatatttcaccagtttatctggatctaaccaaatacgcatcgcgtattgtgtaccaaataactgagtttcacccacccctgtgacacggcttaatggatctttaattgttgcacctacatagtcggcgatgtcatcttgtgacattgagccatcaccagagataaaacctgcaaccattaagaatgaactagaagatttatcgacactaatcccttgttgttgtacttcctgaggtaaaagaggcattgccaattgcaatttattttgcacttggacttgcgcaatatcagggtcagtaccagcttcaaaggtcagcgtgatattcatcatacctgcagaatcactggttgaagacatataaaccatgttatcgataccattcatattctgttcgataacttgggttacagtattctgtaccgtggttgcatcagctcctggatagaccgcagagatggaaatcgctggcggtgcaatcgttggatattgtgcaacaggcagtttgatgagtgccaaaagaccagcaagcatggtaattatggcaattacccacgcaaatattggtctgtctataaaaaacttaggcatagatcatcgactccttattgaggatccttcgctggttcagatttttcagttgatgctgttgcatctaaattttcttcttgtggcgtaaccttcatttcaggttttgctttttgtagccccgaaacgataacgcggtcaccaacctgaacaccactattcactagccacttattaccaactgcttgtgatacttcaatagtacgcacttcaaccacgttgtctttattaacgaccatggttgttgcttcaccacgaggagtacgaataacagcttgttgtgggatcaaaatagcattttgacgaataccattttctaattttgtacgaacaaacataccaggcagtaattcaccatttggattaggtacgattgcacgcatagtgatagagcctgtggattcatcaacggtcacatcagaaaattctaaatgacctttttgagcgtaggattgaccattggttaaggttaagtgaacaacaggtttaccttgctcttgacgaacaatgccactttcaatttcattttttaatttcagataatcttcactcgattgtgtcacatcgacataaatcggatcgatttgctgaacggttgttaaagccacttgctgaccaggtgcaactaatgcgccttctgttaccgttgatttacctgaacggccagaaattggtgcggtgactttggtatattcaagattaatttttgcattagtcactgtagcttcagctgcttttactgcagcaacagcttgagcgtactgagatgttgcggtatcaaaatcttgtttactgacataattggtgccgagtagaggtttatagcgctctacagttaggcgagcaatttcagcattcgcttttgcttttgctaaatcagcttgagcactgtttaatgtagcttgaaaaatagcaggatcgatttggtacaaagatgttcctgcttctacataactaccttcggtgtaattgcgttttaagatgatgccgccaacctgagggcgaacctctgcgatacgataagcagatgtacgaccaggtaagtctgttgtgatagtcagtggtttcgcatctaatgtaacaacacctacagcaggagcaggaggtggacctccagcagactgatttttgtcgccacatccagcaataaccaagctgcctgaaagcactaacagagccagaggcaaaacccctctgttttttcgcataagaaaacctctattcaaaagttgtttcccgggataaaaaataattaagttgatgaatgattgcgatgtatagtacaaacatacatgaatgtatgtaaattaacttcagtcaaaatcgaggaataatggcacgaaaaactaaacgccaagcacaagagacaagacagcagattattgatgctgcacttaggctatttactgtgcaaggtgtttctgccacatcactttcagatattgcaaccgaggccggagtaactcgaggtgcaatatattggcactttaagaataaagtggatttatttactgaagcgtgtgaactcaccgacttaaaaatagaatcattagaattagagtatcaatcaaaatatccagatgatccactatttgtattaagagaattgcttatttacatattgacatcaattgtcgaagatccgaaacataatgcacttctagaaatatatttccataagtgcgaatttgttggtgaaatgacaccaattgttgaaatccgccgagaattatgtgcagccgattactctagaatagagcaatctttatctcgctgtatcgaaaaaaaacaactcccagccaaccttgatttaagaagagctgcgattatgttaagagctatgatgacagggcttgctgaaaattggttattttcaccagaaagtttttctattaaagaggaaagtcaatatttggttgatagttttattgatatgattaagcatagcgtaaatatgagaatatcggcgctatcttaatttattcttaaacataaggaagaagttcatgagcaaagtattagtgattgcaaatggtgcagcatacggtaatgaatcattatttaacgcactgcgtttatctattactttaaaagagcaacatccagaaacgcaattaaatatctttttaatgtctgatgcggtaaccggtgcactggctcatcagcaacccaaagaaggttacaacctccaacaaatgttagaaattttaacggcacaaaacgtccctgttaagttatgcaaaacctgtacagatactcgtggtatcagtgaattacctttagtggatggtgctgaacttgggacattggtggacttagcacaatggactctcgacgcggataagattttgactttctgatcaatattctgttttctcaggggagaaacatctaggcgacttgttctaatgacactgccaatttcaagtaattggattatactaagaggcagtttttcaatattcattgaacaagttgctcaatatgcgtggatctaacgtttttattcgattaaatcattttatttcgacaatatttattgtctctatcctctttgttttgttaggaaatatactttttaccccggctaaagcagaaacagtcagcaataatttacccaccaaagaaagtattcaaaaccagcttaatttattaaataaacgtagtgacttaagtgccgaagataaactcactattggtgatctagagcaggcattgctacttcttgataatattcaacaactagagaaaaaagcagacgactataataagacagtagagcaattaccagaaaagctacgcagtattcaaaatcaattaagtcaattaaaacagaaaatagcaaacaaagaagttgatgactaccgtcaatctttagagagtctaccgcttgcaactttagagtcgcaattagaagaggttttacaatccttagcgaaagcacaggaagatttagccaattacagtaatgagcttattgttttacaaacgcaaccagaaagggcgcaatctgttttatttaataactcagaaagattgcaacaaatacgaattgcattaaataaaagcagtgcagataaagctcaaatgcgatcttcttctgtgcaacttttacaattagaacaatattatttgcaacaacaaaacagttttcaaaaacgaacactgcaatctaatgtacagctacaaagcttattacaattacagcgtgattatagttcagcctatattgacctctctcaagagcatgctcaactactgcaagagatcttaagtgataaacgtttagacagttcagaagaggttgccaaagaggcgcagacggcagagctgagtaatcaggcgattaaaaataacgctttttatttagctcaagctgatattaataaaaaactcagcgataagctgattattactacacaaaataataatgagttaaatcgccatagtttaatggtcaaaaaccgcctagatagagctatccaatcagagcgcaatcttaaagagcaaattgatgtattgaaagggagtctgttgctctctcgtattctatttgaagagcaaattgagctacctgatgatatctttatcaataagttaccggataaaattgctgacttacgtttagaacagtttgaaatcaataaacaaagagatcagatttttcagccgaatctctatatcgaccaattaatgcaagagtaccaagccgcacatccggaaattactgataaaaatgagctaaaagagctacataatgcattattacaactgattgatgcgcgacgagatctactggataagctcaataatcaactgggtagccaaatttctgaatctattaatttacagatggatcagcaacagctacgtagtgtggtgagttcattagaaaacaccttagcgcaacaaatattctgggtaagcagtaataaaccgattaacctcagttggttctcaacctttccagatcaggcagtggctgaatttcaaagttttaaactcaactggtcaaatgaaaatctgttgaccggggctaaaaaatcatatcctgtgctgattgcgctagttttgttcagtagcatactgatttggcaacgtaaaaaatttgataagcagtttgataaattaagtgctgatattaataagcttaataaagatacgcagttacatactccattggctttagggattgttttcttaaaaacattacccctttcttgtattgtgttagcgataggatattggctaattaatagctttaatgtgcaacaagagtttatctggtcttttacttggcagtttgcggtattttggctgatgtttgagtggtcttatcgtttaatgtcggataatggagtggccgttaatcactttaagatccccctagagcgagtacaacaaaatcgtaaacgtttattacgtttatcgcttcccatgttgcccattattttactttccgcttatggtattaataacccattattgttagtgggtgatgtgattggtcaattagtgacaattatttcactcttttttattagtctgtgtgcattacctttttgtcgtgaaatgtggcaagaaaagggtaatcatgttgtgagaacggtggttatcaccttattaactttctcgcctttacttttaatggggttagttatttttggttattattacactgcactacgtttagccaatcgttggattgatagtttatatctacttatgttgtggtttattgcttaccacgcgagtttacgcggccttactgttgctgcaagacgactggcgtatcgtcgagcgctagagcgccgacaagcgatgcttaaagagaaaaaagagggggacgataacactctcgagccaatccaagagccaccgatggatatggagcagataaaccaacaatcattaagattaaccacaatgatcttatttattatctttgcttccagtttttatggtatttggtctgactttattacaatttttacttacttagatggtattacgctttggcattataatttgcctacagagttaggtaatgtggttaaagcagtgacggttgctgacttactcctctcttttgccattatggctatctcttggtttatgataagaaacctaccgggtttactcgaagttcttattctttcaagaattaaattacagcaaggcgcttcttatgccattacgactattctgacctatattattattgcgataggtacaattgtttcgctggggatattaggcgtagcatgggaaaaactacaatggttggcggcagccttaacggttggtttagggtttggtttacaagaaatattcgctaactttgtttcagggataattatcttatttgaaagaccggtcagaattggtgatacggtgacaattggctcttattctggaacagtgagtcgtattcgtatccgagcaaccacggtaacggactttgatcgcaaagaggttattatcccgaataaagcctttgtgactgaacgactgatcaactggacattatctgatactgtcacacgtattatcattcaagtcggtgttgcttatggttctgatctggataaagtgaaaaccattttaatgaaagcagcaaaagataatcccaaagtgatgactgagccagagcctgtggtgctgtttaccgaatttggggctagcacgttaaatcatgaattacgtttttatgttagaacgcttggggatagaaatactgctatcgacgaagtcaaccgcgctattgataaactttgcaatgaaaatgatatcaatatcgcgtttaaccaattagaagtgtatctgcataataaacaaggagaagaagtgcaagaaataaaaaaaggccctcttgatggttcaacacctgaagcgaatacgccatttaattaaatagtaagatgtttagttagcggtttgattatctcgttttttctcataatcaactcgcacaatttccagtgcctcaagtacggtgttgggatcaatatgattggtttcaaataagtaaatcaaatcaaccgctaactgaactgatttaggggcatcttttaattccattatggctccgattaatatttatcttcttgtcgttcaatactcttttctatagaaactagggcacttttacaacgcgctaggcgattttcaagagcagcaatctctttttgtaattcttgttggcgtacaaagccttgtgcttgagttaaagcaagctctctatcttggatcatcgactgtaatcggcgctcgtaatcctgatgttgggcaagtttttggtataaatcgacactttttttgcgttgacttagctggttttcttgctttcttagtgtttgtgtcgataattcacgagttaatgcttcaatttgttgtaggatttgtgttgccagaaacttaacttgctggctacgttgtgcctcaacacaagttattaactgagtaaaattatcgcggatctgttgcatataaccaccaagagaatcactgcggtggtgaaatagtgctgtgtcgaagcaaggtgctgcaatttttttgtttgcaattggcgctaaggtttcggcgagattgtcgatctgttttttaaacaaactcaatggatctgtttttttcatttgggctttgtacctgttttgctaaaaacatgaattgacttaaagcaacaaaaaagagttgttcactggctttctgttgcattttaacggcatattgcatagattctatcgtttcgttttttattatggcactgattatgactgctaacgcgcaacaactgcaatttattaaagacagcattgaaaccattcctgattaccctaaagaagggatcttattccgtgatattacgacattactggataatcccgcggcatatcaggcaacgattgatttattagttgagcactatcaaggtcagggtatcactaaagttgtaggtaccgaagcccgcgggttcttatttggtgccccagttgctttacgtttaggtgtgggttttgtgccagtgcgtaaaaaaggtaaattgcctcgtgagacgcttagtgaaacttatgatctagagtacggtacagatacattagagatccataaagacagcattacggataaagataaagtattaatggttgatgacttattagcaactggtggtactatcgaagcgactgctcgtcttattcgtcgtttaggtggaactgtaacagaagctgcatttattatctgtttacctgatttaggcggtattgagcgtctagaaaaagaagggatccatagcttcacattagttaatttcccagggcattaatgcttttttagtgtcaatcagatgcttaatgcatttgctggtaaatacctatcatcgtgcgggtgtatcaaaatgtatgacccaatacattgggcccgcacaatagtcaccgctttaaagtgtgcggataatttcatcaatatctcatttgtttcctacagatctcgctcaataggctatccctgtgttagcatagagataaatcttgttcatatttagcggaatcaatgagctatcaggtacttgcccgaaagtggcgcccacaaacttttaacgatgttgtcggtcaacgtcatgttttgaccgcattggctaatggtcttgatcaccaaaggttacatcatgcttatcttttttctggcactcgcggtgttggaaaaacgacgatcgcccgtctatttgctaaagggctgaattgcgaaacaggcataaccagtaaaccttgtggtaaatgtgctaattgccttgagatagagcaagggcgttttgttgatttaatagaaatcgatgcggcatcaagaacgaaagttgaagatacacgagagctactcgataatgttcaatatgcgccggctcgtggtcgttttaaagtctatcttattgacgaagtgcatatgctttctcgtcatagttttaatgcgttacttaaaacgttagaagagccacctgaacacgttaaattcctgttggctaccacagatcctcaaaaactacctgttactatcttatctcgttgtttgcaatttcacctgcgggcacttgatgttgaccaaatagcgacacagcttgagaaagtactatccgcagaacacattgaaaatgatgtgcgagcacgccaattaattgcccgtgcagcagatggaagtatgcgtgacgcattaagcctaaccgaccaagcaattgcgagtggcgaaggtattgtaagtacagaagtcgttagtcgtatgctaggcacgattgatgatgcacaaccattagcactgattgaagctttagtaaaagcagatggccaacaagtgatgtcgttggttaatgaggttgctttaagaggaacggattgggaaaactttttagtcgaaacgctctcattattacatcaaattgcgatgttacaacttttgccgagtgaaaataatccccaagagcaatttacacaagagcgtttacgtttattagccaaatcagtgtcgccacaagatttacaactttattatcaaactttattagttgggcgaaaagagctggcttatgcgccagacagacgtatgggtgtagaaatgacccttctcagggcgcttgcttttcatcctaaaactgtcattgatgaaatccctacggctcctttagcgcaaacattgcctttagcatcacagccgaatcaacagcgagttgaaacatcggcgcctcaagtgagaagcaatatggcaacggcgacacccaaagtatcaccgtcgccagaaaacagtgctgcattaggaaatagccctgcggcacaactgttaagagcacggcaagccataaggggagctgagcaagaaacgccaccaaaaaagcctcaaccggcgacgcctaaacaggctaagccggctgctagtgcattagagcggctagcagccgtcagtgaaaaacgccagcaaagggttaatgaaaaacggtcatctgttgcagtcgagaaaaagaaaaaagaagcttatcaatggaagccacaaaatccacaggcacaagtaacagagcccgtggtctcttcaccgaaagagatcaaagaagttcttgagtatgaaaaaacgcctgaattagccgctaaaattgcgcaagagtcgcaacagcgggacgagtgggcggcggaaatagctaaaatgccattgccgaagttagtgcagcagttagcgttaaatgcctataaagagacggtcggtgaagaaacgatcattttgcatttacgcagtaagcagaaacatttaaattcagcaaatgcactacgaacactgacaaatgcgctaagtgaattgcatggaaaagcaatttcactcacaattatagaagatgataatctaacggttaaaacgccgttagaatggcgacaagccatttatgaagagaagttggcgttagcgcgtcaatcgattactacggataaaaccattcagacattacagcactattttgatgctgaattggatgaagagagtatccggcctgtttaatcgcaacatgttgtatatttctatacagcgtagcttttacaaagagagacaattatgttcggaaaaggtggtttgggcaatctgatgaaacaggcccaacagatgcaagaaaaaatgcagcaaatgcaagaagagatcgctaacttagaagtcaccggtgaatctggtgctggcttagtgaagatcactatcaatggtgctcataattgccgtcgtgttgaaatagatcctagtctgctagaagatgacaaagagatgttagaagatctgattgctgccgcctttaatgatgctgcacgtcgcattgaagagacacaaaaagagaagatggcatcagtctctaatggtatgcaattgccaccaggctttaagatgccattctaatgcaaactagccctcttcttgaatcattaatggaagcgttgcgttgtttacccggcgtcgggccaaaatcagcgcaacgaatggcttttcatctgcttcaacgtgatagaagcggaggaatgcgacttgcacaagcattaacgcgtgcaatgtctgaaattggtcactgttgtgattgtcgaacatttactgaagaagagcgttgtacgatctgtgctaatgctcgacgtcagcaaaatggtcagatatgcgtagtggaaagcccggcagatattcatgctatcgagcagacagggcagtttgcaggtcgatactttgtgttaatgggacatctatctccgctagatggcattggtcccatggatattggcttagatagacttgaagagcgtctaagccaagagcctatatcagaagtgattttagccaccaatcctacggtggaaggtgaagctacagcaaactatattgctgagatatgcgctcaatatgatattgctgctagcagaatagcacatggcgtgcctgttggtggtgaattagaaatggtggatggtaccacgttgtcacactctatcgcgggacgccagaagatccactattaatacacaaaagatttaataaaaaagcaccttgttatcaatataatgaggtgctttttttttgattttactgtcaccttgactgatattgttaatattgcctcaattatattaataatgactatttgttgcttatttgtgatctaaatctcccttttttgtataataaaaaagattttttatgtaattaatagttttctaacttattgatagtcataaatttgttatctcgatcacaaaaaaaataccttttaacatcagtaaaaccactcaactgagaaaatagaccgcttaactcactatataaccgtttagcgatttaataacactattcatcagacattcttcatatgatgtcactgcgggtcattattttcatattcgctcaaattattatcaattgtcccgtactactctttggctgttcggtcttgcctgaaaaaaaggtgtctcatgaacaaaaatacatttcttaagcacataccttgggtgatcctcgggattattggtgctttttgtctgtcagtggttgcactacgccgtggtgaacacgtcagtgcattatggatagttgttgcttctgttgcggtctacttagtcgcttatcgttattacagtctttatattgctcaaaaagtaatgaagctcgatcctactcgagccactccttcagtaattaataatgatggtttgaactatgttccaactaatcgttatgtcctctttggtcaccactttgccgctattgcgggtgctggaccacttgtcgggccagtattggctgcccaaatgggttatttacccggtacactgtggttattagctggggtggtacttgctggagccgtacaagactttatggtgctgtttatttcgacgcgccgtaatggtaactctctcggtgagatgataaagaaagagatggggcctgtaccgggaactatcgcgctgttcggctgtttccttatcatgatcatcattcttgcggtgctagctctgattgtagtgaaagcattagcagaaagtccttggggagtcttcaccgtctgttcaacagtacctattgccctatttatggggatctatatgcgctatattcgcccaggtcgtgtgggtgaagtttctgttattggtattgttttactgattgccgctatttggtttggtggcgttatcgcgagtgatccttactggggacctgcattaacctttaaagacaccactattacttttgggttgattggttatgcgtttatctctgctttactgccagtatggctgattttagcccctcgtgattatttagcgactttcctaaaaattggtgtaattgttggtttagctatcgggattgttattctaaatcctgagttaaaaatgccagcgatgacccaatatattgatggtacaggaccattatggaaaggggctctattcccattcttatttattactattgcttgtggtgcagtttctggtttccacgcactgattgcatcaggtacaacgcctaaattgatcgccaatgaaatggatgcgcgttttatcggttatggcgcaatgttaatggaatcatttgttgcgatcatggcattagtggctgcctctattattgaaccgggtctctattttgcgatgaatacaccgcctgccggattaggcattacaatgccaaatctgcatgagttagggggtgaaaacaccgcaatgattatggatcaattaaaagatgtcaccgtacacgcggctgcgacagttagctcatggggctttgttatctcacctgatgagattttacaaactgccaaagatataggtgagccttctgtacttaatcgtgctggtggtgcacctacattagcggtgggtattgctatggtgttccataaaattttacctgcggcagatatgggcttctggtatcactttgggatcttatttgaagcactctttattttaacagcattagatgcaggaactcgttctggtcgttttatgctgcaagacttgttaggtaattttatcccatacttgaagaaaacagactcttttattgctggtgttatcggtacagcaggttgtgtcggtttatggggttatctattgtaccaaggtgttgttgacccactgggtggtgttaagagcttatggccactgtttgggatctccaatcagatgttagcggctgttgcacttgttttaggtacggtcatcttaatcaagatgaagagaacgaaatacatctgggtaaccgttattcctgcagtatggttattaatttgtacaacatgggcgctaggattaaaactgctcagtaatgatccgcaaatggaaggtttcttctatcttgctaatgagtacaaagcgaaaatcttagccggtggggcagatcttactgccgcagaaatcaccaatatgaaccacattgtgattaataactacaccaatgcaggtttaagtattctgttcttagtggttgtttacagcattattttctacggtatccgtaccgcaatgaaagcacgtaaaaatccgaaagagtcagcacaagaaacaccatatgtacctatgccaaaagatgtgaagatatcttcaggtcattaatcttaggcgaataggctaaaaacccccgcactcacttaatgagtgcggggcttaggagaaacttatgtttggtaatttagggcaagctggaaaatatctaggacaagccgctcgtatgttaataggtattcctgattatgataactatgtgcagcacatgaaggacaaccatcctgataaaccagtgatgacctataacgagtttttccgtgaacgtcaggaagcccgttatggtggcggtgatggtaaaggtggtttccgctgttgctaataatctgtaaaggagacaaataatggaacctattgcagtaacaatattgactggctttttaggatcgggaaaaacaacgcttttacgccatatgctcaatgaggagcatggctataaaattgcggtgattgaaaatgaatttggtgaagtgcctatcgatgatgaaattattggtgatagagcaacacaaataaaaacactcaccaatggctgtatttgttgtagtaaatcgaatgagcttgaagatactttgctcgatctctgcgatagtcttgatcgtggtgacattgtgtttgatcgcctagtgattgagtgtacagggatggctgatccggggcctatcacacaaacatttttttctcatgaagtgatctgccaacgctatttattagatggcattattacactggttgatacaatccatgctcagcaacagttagatcaatttgctattgcacaatctcaaattggttatgcggatcgcattctattaactaaaacagatattcaacctgcgagccaacaattacttgctcgtttaagacgtattaatgctagagcgcctacctatacggtgatcaatgggcaaatagatttagcactattatttaacgtaaaaggctttatgttgaatgatactttagaggtcaagcaacccctgtttcgttttcagccagaaaaacaagatgatattcagtctattgtactaaattttgattatcccgttgagttacaagcagtctctgatgttatggagtctttgttattgagctttgccgataacttattacgttataaagggatcttaaatattaaagatagtcctaaccggttgttattccaaggagtgcaacgattatatagcgctgattgggatagaccttggcaagagaatgaaactcgtcaaagcaccttagtctttattggtattcatctgccagaagaagaaataaaagccagtttcgatgcgttaatgcataacactaaagaatatgagtaatagcgattgtttgagaaaagtgtttgttggtagtgatgtaatagcagtaagcagtaaatagcagtaacgaatattaatcatgctcctggacttgaggaggatcctgttcctaggatcttatgtttcaccccataataaccattatggggtgttttttttatactaattagccgttagcaacagctttatattccataatttcaataatttgtacatcagtatgttgcattgctcgactagctaatgcacaaagattctcgattgtcatatcaacatcatgagtgacaatgccgtcattacccgtcacgcaggtatcatctagcgccattaataccgctttataagcggcacttgctcctgtcgacactttcatcgcacaactgttagaggcgccatcacaaatcacgccactaatatcgccaatcatactactaattgccattgccatgggttcatagcgttcttccattagccacgcaatagcaccagcagctcccattgatgcggttgttgcggcacatagtgcggaaagtgccgggaatttatggtgaatataaatggctaataaatgtgaaagcattaatgctcttgccattttttcttcactaacctgtaaatattcagcaaccaccacaacaggcattgtagctgcaataccttgatttcctgaacctgagttactcatggcggggagtacggcaccgcccatacgtgcatcagaagccgctgaagtgcggatcataatttcagaaagcagatctttagctaacaagccacgttgttgctggcgttgtaaggtttgaccaatatgcaaaccgtaagtattgttcaagccttcttttgataatgcgtcatttaattgcgccgattgcaaaataaaagaaatttcttctacaggagcttgagtaataaactgatagatttctcgtgtgttagtgttggttaaggcttgcttaatttggcaaggtaaggccgtttgttcagattgtgatgataatttatcaagcaccacctgaccattatggataattttaacaatattagtatgatcacctgcaataatgacggtggcactgttttcaccatcttcaacggtaacctcagagtaaagcacctcttggcaggctttttttattgatacgcagactatgcctgaatttaatagatttttactcaactcaacttgttctggtgtggcattttttaatacttctagacctgcttcactatctccagcaacagcccctaaactagccgcaatggataatcccaccatacccgtgcccggtacagtcactcccattccgtttttcattaagttaggagaaacctctgcgctaatacgggtgatattatgttgcagataacgagctgcagtggcagcagctaatgcaagtgaaatgggttcggtacaacctaaagctggcttcacttgttgcttaacagcttcaattaatattttccagtaggaagataattgttctttcattgcattatgtccaataaatagtttaataattcaaggcgttatattgtaattttgatgctttgatcatactgaatctattggagaaaatgttttctgaatttcctaagcgggtgtaaattttgagaaaaaaatactatttacagatattaaattagtaatattttatcttggatcagtgagggttattgaagaatttgatgtagcagtaatagtatcaaatcgaacaaaataatttctttagtgatagttgatgattataaataaaaaacaatagaatgaatgactcattctattgttagtataatatcatacttaatgtgggctaactcagaatagttaaataaatgaccagccagtgatgatgatagcatcacttacactcattatttaacatagtgaatattatgactttttgcagctttggtataagaataatctgaggtttttttataaatatatttatctatttgcatgatgtagataatagtaaaataataattaaaatattctttactattttttatttaaaatgattaacaataaaatagttactattaatttttagatggtgaatatttataaattgcctgaagcaaataaatgcttcaggcgagttacttaataataaaatatagcaataatggcgcagtggaaaacaaaaccaaccataagaggaacagcggttctttttaccacatcaaagggttgcaatttagctccactggaaaccgcaatgatcacgcctgccacaggagacatgccgcgtcccatatgtgatgcctgctgcataggtaaaatcattgcaattggattaacccccatgctatgggcaatttgtggaataagttcaacgaatgcaaggaaaggtgcattacctgagcccataataattgcggcagccaatgtcacgatagcgaacactaatgccatggcaaatggtggtagaccaacagattccgccataacgatcaggctgtctattgcaccactgactttaataccatgagcaaaaacacccgctgcgactaatagcccaacaacattactaaatgcagaacccataccctttagaaaatgttggaagcctgcacacactgatttaaaatcacgtaagcgtaatgtttcaatcagcatacaaattgccattgaaattaatacaatagtgacgacatcaaggtgaataccttcaacaaataggcttgatgaacttactgccataataataggtaacattggcagtagggcataaaagccggggatatttttatcacttttggcttcttctgctatttttcctaattggggtacaaaacccgctttgcgatcacaatggcgttgccagaagatatgggtaataccaacagctaatacagttgcaatcgccgcaggcccttggtagtaaagcacatactcaaccacgcctaagtcaaccgcttttgcacctcgaatagcatcaatcgctgttggcgtgtaagcaacgcctaatgaagttgcaatgacaccggcagcagatgctggagataaacctagtcctatcataatggggaacatggtacccattagtagaacggccaatcctgtggctgacggaatagcaagttgcaaaatactcgcgagtaaaaaagagaaaaatagcaacacataaggtgagcgcatatttttcaatgggcgagttgcaacacgtacaacagcttcattagcaccaatatgatccatataatgggcgaatcccatgagtgccatgatcatcagacctaaatctgcagcacgactactaaagagatcacgcataacctcaaagggatctagccagctaataccggttgttttgacatttttaggcagaatatctccccaaccaaatatcattgttagtgccattaagattaaaccagcaactaacaaaaccggctcggctttatatccttttaagatcattctagcgacaataataacgacaattaagaccgcaagaatttggatcatgctttagctccgggtgcaaaacgctctgcggtgatcttaacgacagatttcaatacatcgctggcagcataaagcgatttaacgggaagatattcataaatagagtggaaattgtgcgccccggtaaagatattagggcaaggtaatcctttttgcgataatgctgctccatcatagccaccccgcatagggattggacgaggggtaataccattggctttataagcatcaatagcaatatcgataggatatcgattttcaccttgtagactattaaagacatttgcataacgatcggcttgcttacaaacaacagtcccttcaccccataacgcttcacattgctctgaaagttgttttaaaaatgccatacgatgggcgtagcctgcttctgtgaaatcacgcacatccatttttaatacagtacgtgcgctattacccgccagttgttttacccaataataaccttcacgaccttcagtatattccggtgcttcaccgcccggtaacatcgcaataaatttatgagccattaacagtgaattttttaatttaccttttgctgacatagggtgtgctgaggttccgataaaggttatttcaacatcaccggcattccaattttcatatacaagttcaccaataccacaacaatctaaggtataagcaaagtctgcgccgaattctgttacatcaaaggcttttgcaccacgtaaaccttgctcttcatcgggtacaaaaccaattttaactgtaccgtgtttcacttctggatgttgtttaaaatattgcaacatatccataatagaggcgatagccgctttgtcgtcagcgcctaataagctagtaccatctgttacgatgatatcgtcaccaatatagttttctaattcagggaattcactttgacgtaaaaaaatctcaagttctttgtttaagcaaaggtcgccacctttataaggtaaaatttgtgctttagtatcattagtttgttctgcactggtatctaagtgaccaaagaaagccacggtaggaacctcataatcaaggttagaaggtagtgtcgcggtaacaatggcagtatcgcgaattttgatatcttcaacacctaacgcctttaactcttcgactaattgtaaagcgaggactcgctgaccttccgatgaaggcataatccccgctgcgccattttctctatttgttgtagtattcaccttggtgtaagaaataaaccgatcaacaatgttcatgattagactccgttgtgttttttgtattttatttaataaaattctgttgtctcattattgagaatgaacaacagttacttttatcacaaaaaaagcattaaagaattataaaaaaataattttttttacaagaaaattttaatgttaatcaatgtttaatttttgttttttcattattaaaaaactgtttttaattatgaagatattttaaagtataattatttttagaaaaaacaaaaataagttttttctggtgtaatttattgatttttttagtgatttttgatgtttaaaattatttgtgaagatagtggtgagtaattaactaaaaattaattacttattgatagaatttagcgaaagtataatatttaattctgctaaatctattagggagcagatatgcaaattaaaagttattttaaaaacacgccattatcgctaaaaagcattaataatgagagttataaatttaatacaaaattgaaatcagctatattaagttgttataatacaatatcctcttttataaaaccattttttcataaaacttcaaataattcagaatttaaagttcatatttctaatattgaaaatatgaaaaagaatgaaaatatacaatcagataataaagtaataaacacgcctcactcaatgaaagatgataatgataaatttggagatttatctaaagtacacaaaaagtttaaagttgatgaaataataaatttaatcattaatgatattatctctgttttagaagaaaaacctacattagagaaaggaaaaattatacaatttgaggatgagttacattctcactctaaaagtattttatcatctactaatgacttgtctttaactgagattaaaaataaatttttagcatcaatcatcgatagcatattaacttcagacgaaaaaataaaatctgaatttgggaatattaataattataaatattttttatcaaatagtataaatgagacggttagtcgttcactggctaaagataaaaatcttgtaaaaaatggcgataaataaaatgataagcatgaattataaagcttaaataaatttaaaatcattaatgaataatgtagcaagttaacttatttatagctagtttctcaaggcctaataatattattaggccttgaaagagcatcaaatatctaagcgcttagcttgccatttacgagagcgccaacgccatgcatttgttaagcctcgtagccactcatcgcaaagaaaacctatccaaattccaattaaacccatttccatttttataccaaggaaatagccaataggaatagcaactccccacataaaacaaacggctgtaatgagtgggaatttggcatctccggctgcacgtaacgcattaaccataacaatattaaatgtacgcccaggctccaaaaagaccgataaaataaataaaggcaacagttggtcgataatgcgttgatcttcggtgatagaatacaaaataggatcacgcataaaccaataaataatcaccacgccaatagtaaatagcacacctgcttttaggcttttaaaaccccgtgtaaatgcatcatcaaatcgttttgcaccaactaaatgaccgactaatatttcattaccaatgctaatcgcaatgccaaataacattaagaataatgatagttggaaatagagtgtttgtgcggcgagaggaacttctcccattaagcctataaaggcagaggcggtcatataatgtaaaatccacactaggttttcacctgcagcaggtaaaccaatatgtagaattttggctaacatatttttagaccaaatcactaatagtcttatatcgaatttaattcttaatccatagaataaaagaccacataataagacaacggcaataatacgaccgacaactgttgaccatgcaacacccactaaaccgtattgtggaagcccaaagaaaccatatagtacaatcatattgccgataacagtgacaatattggcaattaacgtcacatacatcgccgctttcgatttaccataaacccgcaaacaggctgctaagataattgaaattgcttcaggaataagacaaatccccaaaatatggagatagttatagccatcttgtactaaatgctctggcgtattcattacatttagaatgttgtagccaaaaaagagaataataatggcactactaaagcccagcaaaaagttaaaggcgatagaaatatgaatagcttgactggctttatcgcgcttaccggcgcctaaatattgagcaataacaacgctacatcccacgctaataaagttaaatatggtgataaaaagatcaaaaacttggttacctacgcccattgcagctaaataggcagtagagacatgacttatcatgtaagtgttaatcaatagcgtggcaagatgaagaaaaatatcaataaaaataggccagctaagggaaaaaagtgagcgatccgctacatcagattgatgcattgaaaaccttcttaaaaacgagtgaaatagtgttgtaaatataatcagaggaaagtggagcgattttacatgctttatgaataagggaatagctaaattgatgaaccagtagcaaaaaaactttttatatggtttattcgttgattattaaacattattatcattcaataatgattaacaacgagaacagggaaataaatgaatactaaaataaaagtcgctattgtgggctatggcaatattgggcgctttgcactagatgcagtacttgcagcacctgattttgagttagtgggggtggttcgccgtgatagtcaaaatattccagaagaactgcgaaatataacagtaacaaatgatattaaaagcttaggtaaggtggatgttgctttattatgttcaccaacgagagccattaaagatttggctaaatcgatattgagcttaggtattaataccgttgatagttttgatgtccacagtgatatcgttgcattaaaaacagaactggatgaggtggcgaaaaagcataaccgtgttgcagtgatttcagcgggttgggatccgggttcagactctattattcgtaccttaatgttagctatggcacctaaaggtattacctacactaattttggtcccggtatgagtatggggcatagtgttgccgctaaagctattgatggtgtaagagatgcactatcaatgactattccattaggtactggtgttcatcggcgtatggtttatgttgaattagaaacgggtgctaactttgcacaggttgagcaagccattaaggccgacagctatttctcatctgatgaaacacatattaaacaagttgatagtgttgatagcttaaaagatgttggtcacggagtacaaatgacccataaaggggtgtcaggcaaaacacacaatcaattatttgaatatgctatgcatattaataatccagcattaacatctcaatttatggtttctgcagccagagcaagtatgaaacaacaagcgggtgcctatactgtgattgaaattccccccgttgattttttagcaggggatttaactacattaatcgcaaaactggtgtaatcagttaggcttcttgcaaataaaatattgcccacatgatgtgggcaataggatcaacgcttaggcaaacttgatgatttgagattagcgtttaatatttttaaactcttttgttgttgcagttaaagcgacttctgttggtaaacgttccattgaacttgcgccataaaaaccatggcaatcaggacagttatcaaggatatattgcgcatcttttggtgttgctatagggccaccatgacaaagtacaatcacgtcagaacgtacggattttgctgcttttgcccaatcgttaataagggcgacacaatcatctaaagtaacggctgtttctgcaccaatattgccaccagtggttaaacccatatgaggaacaataatatctgcaccggcttgtgtcatcgcaatggcatcttcacgactaaaaacataaggtgttgtgagtaagcctttttcgtgtgctttacggatcatctctacttcaagagcataacccatacctgtttcttctaggttagcgcggaagttaccatcaattaaaccaacggttgggaagttttgtacgccagcaaaaccgatggctttaacgtcatctaaaaacttatcaaaattgcagaatggatctgtaccattaaccccggcaagcacaggtgtctgttttacaacaggcaatacttcttttgccatatccataacaatttcattggcattgccataggctaataatcctgccagagagccacgacccgccatacgataacgacctgaattatagataacaatcagatcgataccgcctgcttcttcgcattttgcggaaaggcctgttcccgcaccgccaccaataataggttctttacgtgcgatcatgtcattaaattttttgagtaacacttcacgtgaataagtcatacttctttctccgtggttaacaaataagttcctggtgtaaatcataaacttgctgattaaattcagcagaatttatgtgatatggactgatgactaattgacgagtctcggtctctttaaatgttgttataaatgcatcaaaaaatgcttggtttgcttgaggatcccagaatggccccccttcaatatctaaagcagaaaaaccgccctgtggaaaaataaacgtcagtgggccttcacactgattcaatttttcagcgatccagatccccatttgacgattttcccttggtgttgtacgcattaaggtgacttgcgaattatggtgatagaaatgacgatctttatatttctcaggtacggtagcagggcgaccaaagttcaccatatccaacgcgccacaagagacgatacaaggtgttttagtgcgggcgatggcaccaaaacgatcttcatcacaagcaaggacaccctcaaataaataatcacatacttcggttgttgttagatcaagaacactatgaagtaagtggctgtctatcagtttttccatggctttaccgccactccctgtcgcatggaaaactaaacagtcataattattttcaagttttttagtcagttgttgaatacaaggcgtagttacaccaaacattgttaatgcaacagccggtttatcaacactattttcttcttggtaaaaataaacagcgccggcaatttggttggccgcatttctcaataccttacgagagatacggtttaagccggatacatctgttacggagtacatcattgaaatatcgctagcgccgatatatccggagatatcaccggaagccatagtcgataccatcaatttaggtacgccaatgggcaaagattgcattgctggcgtaatcaatgccgttccccctgagccgcctaatcctaaaatagcgaggacatcgtcacagtgggttaaataacgttcaaaagcgacggacattgctgcgatagctttcccgcggtcaccgcaaaacacggcgttttttccatctggatggtaactagcaacttgtgcagctgtgacgtcagcttctctttctaatgctgtaggtttggttgtcaaatctacggttttgacaggaaggcctgctttttttattaattcactgacataaaaaatttcagcgcttttagtatcaagcgtagtcgcaatataaatgaagccagcatactgtttcataagccttcccttaccttttatgattattgacgtgtagattataatcacaatgagacttgagtttcatttataatagcattattttgagacccatgtctcattatttttattttttctcttttaaatgtcgcttaggtacactcaatcgcctaaagtaaactttaatcgtattaagaatagttcttaaaatcagtatagtagccacgaaaagtggagtaatagcgaaggaatttttatgagttttagtcgtaatgaaatagatacaatgtcaggtactcgaaaaagaacctaccaattattggtgacaacggcattgcaactttttgaacaagggatgttacctaccgtatcagagcttgcagcacatgctggtgtttcaagggcaacggcgtatcgctattttcccactcaaagtgatttaattagtgctactgttgatgcaagtttagcaccgatcattgcatggcagcccactccagaagataatacacaacagcgtattactgcgttgctcaatcttgcttatccacaaatgtttaaacatgaaggggcgttgcgtggcgcattgcaggtttcattacagcagtgggctaaagagcggcaatcaagcgaatatacagaaaaacgatttattcgtggtcatcgtaaagagatcttacttaaagtcatcgaaccattaaaagcgcattatccgcaagaaatgtgggataaagtgataaaagctttctcacttatttatggttctgaagtttttttagtaatgaaagatatctggaaaatggatgatcagcaggtcattgatatgacccaatggatggctaaagctattttaaatcaggcaaagtcagattttccgatagataacgattaattatttgaataaatcggttaaaattgtataaatcatttacgttttagctattgtaggatcgttatgtcacacaaaactgcagaccaagagtggctggtagaacaactaaaatatattgcacagggcattggtaaaacattatcgcctttttgtgaagttgtacttcatgatctgaccgatagtgaaaataccattatggtgattgaaaataatctatcaggtcgaaaagtgggggatagagcgactgagctaggtatggcaaggattgaatcgtctgattttccacaaattgttgcaaactatcctaatcagtttcctgatggtagaacagctaaaagtacatcgataggtattaaagataaacaaggcaattatgttgctgctttatgtttaaatattgatatatcgatgattaaaggtttacaaatggtattaaatcaattttcgactctcgaagagggaaatcatatcattgaaacttttagctcagtaacagaagattcgttgaaaaaacgtattgatgaattttctgcaacttattcagtgacaccaagagcattgaaaccacatcaacgacgcgaattgctattgtgtttacaggatgaaggttatctttcacttcgcaaagcaatggaaattactgcgcaatacctcggtgtttcaagagcaacagtgtataacgatttaaaagaatgattaaacgataagttattttttaaattccagcggaatacaaatcattaaactaaaaaaagatatcatttttgatatctttttttatttctattttaaatttaatgtgatttttattgtaaatgattaattaattactactgtgttatttttgtaagtataaattgataaaaagaataaaataaacagttaatttattaatgtaagggcaataaaatgaatagagttaatgatgtaggtgtatttaataagggaatagagttatctactaagaaagattatttaggatcatgttatgtaactattgcaaagaacataaaggatatttctaatacaacggctaagcccagttttataaaaaaagttattcatatgatggaacgatttacaatgttttttgcaattagccaaaccggtagaatgggaataagtaatagagatggaaatttaaatagatatactgaaacacttactgatttaaagattaaggtgaaagatttaaagtgtaagatagatgagtttaataataaactaataaaaaaagatacagtagataaggaaaaagctgagatagctacaattacagctgaatatcataacctaaaccattttctctctttaatagagaatgaaaattcaagttttaaagatagatatagttttttcaattatttaaatgagttgcaacgagcggaggccttttgccgaaattcatcaaatacagattataatcatctggcggatgaatttaaaaatattattaaggaaagagttgaaagaataaaaaaagaagatgttataaaaatatttaatgaagtgttggtaaggtatgataatgaaactcgatttaaaaatagcaatgaaagaatactagctaatttttcaagtaataaggagaaagaaaaatttctgtctaaaataaactttctagtctgtgtttcaaaatataatcttcctcttatggtagaggtagagcagcttaaagaagaatttccagtacagttacgggaaataatgaataaaattctttatgaagaaagtataatgggtgaaattcttaatgaagcgaatattgattgcgtatataagtattcacttaaaaaagtgcaaaatatttggattgaagaatatataaataagttttatggtggtgaagaaataataatggataaaagtacagatgataatgtcgcttattttgtgggggattttgagtgggatagttttgatggaattaataatactaataatgacaatatgaattctaaacgtaatctttctgaagcaagtgaaattattcatggaaaattaaataaacatgttaaaggcgatgaaatatctgatttaacttctattctggaacaaatagaactagataaattaggaggaaaagaaacatatactttaatttctattctgaaagagatgggactgggtaatttagaatggaaagaaatatataatttaatttctattctgaaagagatggaactaggtaaattagaatgggacgaaatatatactttaatttctattctgaaagagatggaactagataaattagaatggaaagaaatatataatttaagttctattctgaaagggatggaactaggtaaattagaatcaaaagaaatatataatttaagttctattctgaaaaagatagaactagataaattagaatgggacgaaatatatactttaatttctattctgaaagggttagaactaggtaaattagaatgggacgaaatatatactttaactcctcttctgaaagagatagaacgaggtaaattaatagggaaaggaatatataatttaacttatattcaggaagaaacagaactagatgaagataatataaataagggtaatttaaaagaaggtgatataaaatatgctaatattgttgaattagtcgaagatcaagtatttacacaattaaatgtagatggatttaacataatagatagcgactatgcgttctcatctgaataaggaaaataaatattttatagtataaaatatttataatactttgtttaaataatattttttgtcactaatcggataattttctaaggtgccaaaaacttcaaatccctgcttttgataaaaaggcagggcttgaaagctaaaagtatccacctcagcatatttggcacctttctttttagctgtattctccattgcttgcagtaattctgtaccaatattgttaccacgataggccttatcaacccatagataacgaatacgtagccaattacctaatatatcaccagtgatcccacctatttttttaccattttcctctttaaaaacggctaagggcgtatattgctccatctgaatatactgaaggttatgtgttaataagccttcataaatttcgttgatttcattcgtcgtcggggcggtagtaatttttaatgacataattagctcttaatattaataaaaataatatttaaattatcattatttgtttattaaatatttataccagtgataggattagtaccataattaaaaaaactggataacacaacatgtcatttttaaaaaaactaccgggaattctgttttgtgcactaattggtgggttattaacattatctggtctaccgatggcgttgatgtttgggccaatcgtcgtggttattattgcttatcgttttaaatggcagctctctgttcctaagcatacactgacttttatccaactgaccttaggcacctctgttggattgatgtttaaccaagtacatttagggagtgcggataatttagtgcttcttttgattatcctcgttatttgtttagccattcaatttgttgtcagtttcttatggtttcatcgtcatattggttggacaaaagaagaggctatgttaggtgctgtacctggcgcgatggcggctattcttgctttaacagatcataccaaaacgccaccacaaaaaattgttatttctcatactattcgtttaatcgtattgattattatggctggatttattgttggctcagataaagcaactcttacggagtttacattacctgaaatgacactgttgtcatcgatgtggttattattaattgtcgcgttagggctagtatctgggcttttattacagaaaattcattttccagcaccgtttatgttgacatcattaggcagtgcaatattggtacaatattttgtcagtgagccgattgcttttccaatgctattaaatgaactcagcatggtgttaattgggatgaatattggcgcacattttgtggtttttccttttgcttcgttaattaaaaatgctttttcctctgtgcaggtggtcattatcaacgttattttaacggtgatcgttgcattgagcgcagcttatttaacaggggctccctggacaacgctggtattagcttgggcaccgggaagtatggaagcaatgacatttgccgcgatcactatgaatgtcgatgcggcttttgtgatgtcgaatcatatattgcgcatgttgatcattcaaagtattccttctattgccttgttttacagtgaacgaaagcagaaaagaaaacgtgagtaaaatagcaataacagtaagatatcgacagatataataaattgaaaagccactgtatcagtttgatagagtggcttttttatacaattaatagtttagtaagctaagtgatttttgggctagtagttgacattttttgttatgagcaatttgtatattttttaaatcctgataactatcttcattaagcttgctcattgggagcattgaataattagagacatcccactgctgagattgtgaaaaaataatcagcgctcgttctattttttgttttgagatctgctcataaccacaatcattatttaaaaacaggtataccgcggttaaatcagctaagtcttctgcttgagtataagtgagtgcttttgcactagaagaaaaaagcgtggcaaaagaaagaataatagtgcagaacaaagcgaacatttttttcattagtggtgacattcctatatgtgatgatttcacaagatttgttatttgacttaattaagttaaaagttttgcaaagacccgttgctttgtgtggtttctatttgaccttccagtaaggggagactttagcattgctcaatagtttatcgataaatttatttacctaattatgacaaatatagagtaattgattttattcaaaggaatacattatgcaacgtcgtgaatttttaaaattaggggcaacattaagcgccgtcacactattaccaagttggagccgtctcgcattcgcccaaactaacacgccttcactcgctattccacctcaaattagcccagacaaacaacaaaagattgttcttaatatccaacaaggtgtttcccagtttactgctacagcaagtacaactacttgggggtataacggtagcttattaggcccagcattaaaattaaaacgtggtgagcctgttactattgagatcaataacacgttaccagagactacgacggtgcattggcatggtcttgagataagtggtgaacaagatggaggtcctcaagctactatcgcaccgggtaaatcacgaacagtaacttttacgccagatcaagcggaatcgacatgttggtttcatccccatactcatgggatcaccggaaaacaggtggcaatggggttagggggattagtgatcatcgaggatgacgaaacggccaagcgaaagttacctcatcgctggggagtggatgatttaccggttattttacaagacaaacgcttagacagtaacggtcaaattgactatcaacttgatgtgatgagtgctgcagtaggttggtttggcgatatgatgctcactaatggtgcaattcaaccgcaacatattgtaccaaaaggttggattagattacgtttcctcaatggttgtaatgcacgtagtcttaatttagccaccagtgatggccgaccaatgtatgtaattgctagcgatggtgggttattagcggaaccagtcaaagtgacagaactccctattttaatgggggagcgttttgaagtactggttgatacctcagatggacgtgatttcgatattgtcactttacctgtccgacaaatggggatggtattagcgccatttgataatgtattacctgtattacgtctactgccttcagcagaaaaagcggtgggtattttacctgatcaattagccttaattcctgcattaccatcactaagtcatattgcgacacgttcattacatttacgtatggatatgcgtttagatatgcaaggtatgatggcgctaacggagcgttacggtgataaagcgttagcgggaattcaccacggtatgagtcatatgcgtcagggcaatggaaatggcatgatggggggcggcatgaattgcggtcatggctctgcggatgtcgatatttataatgcaaatagcatcaatgggatcccattctcaatgaccgaacctgcatttgatgttaaacaaggggtttatgaacgctggctggtttctggtcgtggcgacatgatgttacatccattccatgttcacggaacacagtttcgtattttatcggaaaatgggcgtaaacctgaaaaacatcgccaaggttggaaagatattgtcagagtggaagggcaaattagcgagatccttgtaaaatttgaccatttagcgacaaaggaacacccatttatggctcactgtcacttattagaacatgaagatacaggaatgatggcgggctttacggtgagtcgataatttttactgtaataagtaacaaaattagcgataaaagtttgcaaagggagtaaagctaatattttattcccttattttccttcattgacaacgtcgcatgatgatagaaattctggtacaatcggttgctttccccgttaacccaatcgaaataaatcatgaaacatattgttgatgtcatgatctctgaagaagagatcaaacagcgtattgctgaattaggtcgtgaaatcacagaacattatcgttctcgtcaagaaaaacacgatttggtcttaattggcttattaaaaggctcttttatttttatggcggatttatgtcgtgaaattgaagtgccacatgaagtcgattttatgacagtatcaagttacggtaatggaatgacgtcaacaagagacgttaaaatcattaaagatcttgatgaagacattcgtggtaaagatgttctgattgttgaagatattattgactcaggtaatactttaaaccgtgttaaagagattttaagtttacgtgagcctgcctctattgctatctgtacgctacttgataagccatcacgtcgtgaagtggatgtgccagtagagtggattggctactctattgaagataagtttgttataggttacggcattgattatgcacaacgttatcgtcacctaccttatattggtcatgtaacgctactagatgaataatcttgttgatttatatcgtatattaaaaaacccgctttggcgggtttaatattagaaaatcaacgtggatggcttaattttgcaatagcttggcgataagagagttctagtttttcacgactgtctgaggtgatatctaaatcgtgtaattcaccattgtttaaaccgtaaacccaaccgtggatcatcactttttgtccacgtttccatgcggcttgcataatagttgagtgaccaaggttataaacttgttctatcacgttaagttcacagagtaaatttaatctatcttgtggtgcgagttcacctaacatggagctatgtttataccagatatcacggatatgcagtaaccagttattaattaagcccagttcagtcccttcaatagcagcttcaataccaccacagccataatgaccacaaacaataatatgctcaacttgtaggacatcaacggcatattgaataacagaaagacagtttaagtcggtgtggatcacaaggtttgccacattgcggtgtacaaataaatcaccaggggcggcattaattaatttttcagcggggacgcggctgtctgaacaaccaatccataagaaatgaggtttttggcctttactcagctctttaaaaaattgcgggttttcttctgtaacagaacttgaccattgtttattgttggctaacagttcttcaatttttctcatcatgatgtgactgcctgtaaattcagtttcccaccatttgcgctgacagtaggccaacacgaaatagctttagtgttattgttggatgtttaagctcaataaagaaagggtatttttataccattacttttaaatgaatcagaaggctttttttgagccaagtgacagttaattgcttgtctatttttgctttcaaataagatagaactttttacagtatttgtttaatgaatttatcaacacattatttgatgtaaatcaaatgtataaaaagataactgattgttaactcgattattcttattttgaataatcgagggtaattattttttcataaaaaatattaatgtttatttgggctggcgaatgatgaggataaaacctgttaacggtatctgtccgttttttattgataaattattggaggtaataaagcgcatgataatatctatcagttagattgagtaataaggccaataaatttattgctataaaacaggctaaataataacatttagttattattggctttttattgagattaatactggaaaatagctacaattaatcgtcatttttattgatcagtaattgcagtgttcgctctgttgactattaaaatagttaaataaaatttatttatctgtttgaggcattatctgtaaaacggtttatttacgtcttatttttctctagaatatcttattccattttgatcctattgaactaagcccattttctatacctatcctgatttgcactcaggggagtaaggcttagttgaatagctatttctgatttcagctcagtcaatgctgaataatgcagttgataaaaggtaatttccacttatgacttatgcattggagttaaccgagttaacgaaaacttaccataatggtgtcaaagcgcttaaaggaattaatttaaccgtagaagcgggggatttttatgcgctattaggccctaatggtgcaggaaaatcgaccaccatagggattatcagctctttggtgaataagagtagtggtaaagtcaaagtatttggctatgacactgataccgatatggttaatgctaaaagacaactcggattagtgccacaagaattcaatttcaacccttttgaaaccgtattacaaattgtccttaatcaggctggctactatggtgtaccacgaaaagtggcattagagcgtgcaaaaacgtatttaacccaattagatttatgggagaaaaaagatgatagagcacgttttttatctgggggaatgaaacggcgtttaatgattgcgcgtgcattaatgcatgagcctaaattgctgatcctcgatgagccaacggcgggagtagatattgaattacgtcgttcaatgtggacgtttttacaacatttaaatgcacagggtaccactattatattaaccacacattatcttgaagaagcagaaatgctgtgtcggaatattggcattattcagcgtggtgaactggttgaaaacaccagtatgaaaggtttattaagtaaattagagtctgaaacctttattttagacttagcagcaaaaagtccgttacctgaattacaaaattaccaatatcgtttagtcgatacatcaacactagaagttgatgtgaaaagagagcaaggattgaatggggtttttgctcagctcaatgcacaaggtattcaggttttaagtatgcgtaataaagctaaccgccttgaagagttatttgtgcatttagttaatgaagatcatacagaaacagaaaaaggagagagggaatgattcagttgtattgggtagccctcaagacgatttggattaaagaagtgacccgttttggccgtatctgggtacaaactttaattcctcctgttatcacgatgtcgctctattttgttattttcggtaacttaattggtaagcgtattggtgatatgggcggtgttgattatatgcagtttattgttcccggcttgattatgatggcggtgatcacaaactcatatgctaatgtctcctcttcattttttggcgctaaattccaacgtagtattgaagaattattagtatcgccagtaccgacccatgttgttattgccggatttgtggggggtggtgtcgcccgtggtatttgtgttgggatattggtcactctggtttcactattttttgtaccactagagatacactcttggacaatggttgtggtgacattattaatgacctcgattgttttttctctcgcaggattgttgaatgccatttttgcgaaaacctttgatgatattagtattatccccacctttgttttaacgccattaacttatttaggtggtgtgttttattcactctccctattacctgcattttggcaaggtgtttctaaattaaacccgattgtttatatgataagcggtttccgttatggttttttagggatcactgatgtgtcattaacggtgacaatcacggtactatgcctgtttattgccgtgttttatatcgtagcctggtacttaattgaaaaaggtcgcggtttaagaagctaatctacaaattagtgtttaaggtaataaaaattaaaatcggtgtctgcaacaacagatgccgattttttttagctaaatttcattcagttatgttaaattttatttaaatttgtcttttgctattaacaagtttaatttctttgtttagtatactaaacaaataactttgggatggtaaaggatagaagcatggcagtggcaagcgaaacagcaaaagaaccaacggtactttctcgtcgtaaattgttatgtattgccggaatggggtggactttcgatgcaatggatgtggggcttctcgcctttttattaacggcgttaaaagaagattggggattaacagcagcgcaattaggttggattggcagtattaattctatcggtatggcagtaggcgcttttgtctttggcattatggccgatagaaaaggtcgtaaaccggtatttatcttaacgttgctgctatttagccttggttgcggtttaactgcattagcaagctccttaatggtggtattaattttacgcttttttattggtatgggattaggtggagaattacctgttgcttccacattggtgagtgaaagtgttaaagcccatgagcgtggtcgtattgttgttttattagagagtttttgggcggtagggtggttaattgccgcgttaatagcgtattttattattcctgattatggctggcgtatggctatgttattgagcgcactacccgcagtttatgcactctatttgcgttcaaagttaccagaacccagttccacacagtcattattacaaaatcgtttatctcttcgccaatcaatggcattgatttggtcacctcaatatcgccgttcaacactgatgttgtgggtattatggttttgtgtggtgttctcttattatggcatttttttatggctaccgagtgtcgcaatgttaaaaggctttagtttaattaaaagctttcaatatgtgttgatcatgacactcgctcagttaccgggctattttaccgcagcatggtttattgaacgttatggtcgtaaatttgtgttaatcacttatttagcaggcaccgcgattagcgcttactattttagcgtagccgattccacaaccacactattagtgttcggtatgttgttatcattttttaatttaggtgcgtggggggcattatatgcctataccccagaacaatatcctgatggtatacgagctacaggcgctggaacggcgacggcaataggccgtattggcggaatattagggccactgatggtaggctatttagtgcaatatcaatttgacataagcactatttttcttatttttagcctttccattgtgatagcggtactagcggttatgttattaggtaaagaaaccaaaaatagaccacttaattccatttaatcactttttttatgactaaaaatacagaacgtctcctttcttgttatatgatagttaataagtattttataggaaaagaggaataattatgtctcattatgaggaagtgattaagcaggttgatgaggccattgccagtgctagcatacaaacgatgaacgaattgctggtggaattaggtaaagataacacaatagcttttgctcagcgttatgaacagcaagagcgtctacgcacggctatttttcatcatggtgaaaaacagcgttaagcaatcctatgatgatagaataatcaaaaagcgtttatttcatgtatttattccataataatggataaacgctttgttttaatctgttggtttaaaaagtctttttcccttcgagtactgctattctattttcaatcgaaggatgggttgaaaaaagagagtctcccttattaaaaataaaggctgctttgcgatatgctcgtcctgtagagccatcttcaaaattttcagtttcgtgttgtgctgcaattttctttagtgcattgatcattgattgattatcttgggtgagatcaaccgctgccgcatctgccatatattcacgtgtccgcgataaatagaaatagagcacttgagtaataatgggtaaaacaacgttgagtacaattaaaatcaatcgtgctttactggcggcatcattacttttaccaccacggttaccagaggctatatataagcggctaccaaagatatttgttaccgttaaaataacatttgctaaaatacccacatacagcgttaaacgggtatcaccatgaataatatgacctgtttcatgggctaatacggcttgtatttcttggcgattaagttgatttaacaacccacgagtgacaccaataaaggcatttttttcagaccagccggcagcaaaggcattggcttctggtgtatctaaaatataaagcttagggatatagcccaaagtcgcacttaaactaagctcttccacaatatttaataattgtcgctcttgggcatttaatggctcttcaggattaattagtcgcgctttcatgcccgtcaacatgattttatgccctttaaagtgaacaataatcagcaacacaattgaaatggcaacaataatcaatgaagcaataggcagtgattggaatgtcagaaatgccagcatattatcaattaaacttaaatgaggattggcacctatcgcgctatcaactaataagccgatcattagcattaatagtaaataggtgactatcacaaaccgagtgcgaatggcattttttcgcagtacatttctgaaatccatttattattctccaataatatctaccgtattattttatgtataagctatggtgcgtggtgttaatcaaagttaatacggcgcgcttcttctgatttaatcgctgtttcatcaagacgccagtattctttattaatcacgagacttggaaaaatcttcacaataaataccgcagggatagaggcgataaacgcacgatattgctctaaggtacggttatagccacgtttagcaaaagagagtttattttctgttgagacaatctcttcttgtaaattagccatgatagtatctgatttgagttcaggatagttttcaacagcgacattaatcgcaccacttgaaacaatttttgatagctcatcttctgccgcttttgcttcttggttattgctactttgtgttttagctcttaattcggtgattttagtaaaaacatcggcttcatgactaagatatttttttactgtagctaataagctatcaaacactttaccacgacggtcgagttgtaccgatatttctgtttcacttgagataaccgcttcacgcatagagataatacggttgtaataataaaaaataagacccaataacgcgatggtaataattaatccagtcatgtgaagcgctctcttttctaataataaacagggaatttagctaactcattgatgttaattttgcctattattattcaagatagctagatgattatttcatcaaagagaaaaagaatattgatatgtcacttaatatcttaaaaagaatgttgtttgaagtataaaaaagccccaaataaatttggggcaaaataaataggactcatgttagggaaaataaaaattaaaaccaaggtgattgggacatcacattgccataaaatagcattctgccggcgatttcaccgctaaaaaggataaaaatagtaataattgatattaaagcctttgtaaacaaagagctacgagatagtgtgataataacacatcctattattaaactggcgatgacttgccaccataacaataagctcgctacgttagcacctgaaatttggactcgtattactaatcccatcaatactaacagtaagccgataaaagcaccgaaatgcaatgtatgaatggtttttttaccttgcaactgtaaccaaggaataacagagccaaaacccaataatagggccgtaccaataaaacttatttgtgttgcgggggtatgccataacgcatgtgtttgcatttgataataaatttgtgctgttattaaaataacgggtaagccaataaggccacagaacagacctagtaggctattacggcgtattttatttggttgtagccaacttgctaatgcccagagggaaattaaaccgtttaacataacaaaggcaatagcttcacgacttaaccatgagtgagcaacaccaagtactgagcgataagcgccgagaggatcgcctaggtgtcccattgacatagaagaaccaattacttcaattaaccaaataagggcaatcgttgtacgtaacgctttggggcttaacatggcggagttttgtgtttgccattgataaagagataaggcaagtacggcaccgatcccccattgactcattacggtgaatagaaccaaaggcatttgataatcatgcatggttaatcctccataccaataatgacaatattaggatgactgatggtatgatcaggaaccccataacgtttttctaataatgcccaatttgtgatatgtttttggcgcaaatcttcaatttcgccaaactcaatggcaccagttggacaagattcaacacagcgaggttttaagccttcgtctattctatcggcacacatattacatttactggtcttcccttctacaggatcgtaaaccggcgcattataagggcatgccataatgcacatttggcaaccaatacatttgtcatgatcctgtatcacaatcccatcagctcgcttagtataagtatcggcagggcagacttttaagcattgtggatcgtcacaatgattacaggacatagtgataaaagcttgcgcattgggcagatcttcattgaattcgcgtactctacgccacaagactcctggaggggtaacattttctgatttacaagccatcgaacaagtgcgacagccataacaatctttactattaatcagaaaaccatactgttttttagccatgattatgcctcccgtctcacattaattagggtactgttacaacaatgaccattacctaaaggttcaacatggtcatttgttacatggctactactccccccttgttgttcccaccaaccattatcaagagaaacaacaccttgttttatgtgtgtggtgacaacggctattgctctatgttcacctctatcattaaaagcaaacacccaatcaccattgtttattccacgagataacgcatcattaggatgtattaaaatattgggttgattacgctgtacttctaaaatccattcattcatcccatggcttgaatgaacactacgtgctagcttacgttgcacagccattaacggatatttttttgctaattcaggggagcctgttgtcgattcctttactggataataagtgactataggggagtagtttttatcttgccattcttcaataaagaaatgtgctttttgggttgatgtacgaaatattccgtctttaaatgggatccaatcgccttctactggtcgtacaggccctttttctagcatttcccgcgtaatccccgatcccgcgaggcaagtatcaatatagtgctcaataggttgattaaatacgtcaccgaaaccaaagcgttcagcaaggcgggcaaaaatccaataatcaggctttgcttctcctggtggttcaacggctttttccattaattgaacatattggctacgcacaccagccattaaacttgtatcttcaaaaatggttgtcactggaagtactaagtcggcataaagcgctgttgatgacattaaattatcggctacgacaacaaaaggaactttttttagcgccttacgtaccatattggtattgggtaattgtgtcatcacccccattgtcatgatccaccagaaattaattgggtggggtctttcgttgactatccattcacccacttttgcaacaggaataggattaatgggtttaacatttggtgcagggggaataataggattaaattttgccatctgacgcacgccaccggcatcacaaatacccgcgcctttcttaccaatattgccggttaatagagcaagataaaactggcttgctgcaacataggcaccaaattcagtgcgttgtgcgccagacatattttgtacaatcattgcaggctttgttgtcgcgtagtctcgagctaaacgaataatagtctcttgtggaatatctgtttctttactggttttttcgatagtccagggtttagcttgccaatagatttgttcaaaaacggtggtgtaatttattttatttggcagttcatcatgagttaacgccggtacaatattgggggtatcatggcgaacaatttgctgagttagggtatcaaagactaaatagctatctttatcattagctgaatcacgtagtagtttttgttgttcatcgactaaatacaccgctccggtatgggcacgcaaaaaaggtttatctgtaagattttcttcaatgattaatttgatcattcctaatgcaagggcggtatcggtacccggaataatggggatccactcatcagctttggctgcggtttcattaaaacgcggatcaatgactaccattctggcaccattacggcgagcctgattataatttttaaagtaggcgtgcatagttactgctgggttattgccccaacatagaatataacggctatcttttaccgtatcacgcgtatctgcatagcgtaggccaaccatagggatcatagctgcagtaaccgcagagcaacataaagagccggcttgttttgtagaaccgcctaaatagtcgaaaaaggctttacccatatcgtttttgatggaatccatatttccagcgtgagtagaaataaaaagcccttcgttgccatatttatcgatagtttctcgaatatttttttcgataagatctaaagcgtcattccagctaataggtttaaactcagccttacctttttcgccaacacgtagcaaaggtgtagtgagtctatccttatgatatacccatttagttcggctaattcctcgtaaacaacatttgacattaaagccttctgtagcttcaattttgattagttttccctgatgagtaaaagcggttaggttacaatggagacattccattgcacaggtggattgaaaagtttgatattcagataattttatccgagttttctggttaaatatgggtttattttcattagctaggctaaacgcattaggggaaagagctgccaaaccaatagctcccattccttttaatagcgttcttctatctaattcccactgtttatttttatacataggacattctcacacataataatgttaactatatataaactcagttcattaataataaacttgagttagatcattcaaggataaataaagaagataatcaacagaaaatgatttatattcttatttttcataaaatttttagtgtgaataactataaaaatgaataaaaaaagaacaaacaaatatcgtcataaataaagataaataacgtcttaggcgtggagaaataaatgcagaattctcaaggggttaactctgttgatatcgcagtgactattttagagtttttagcatctcaaggaggtgctgcacgctcttctgagatagctaaggcatgctcactatcaaaaagtcgtctacataaatatttagtgtctctttgccgtagtgacatgctctatcaagagagtgaaggagggcagtattgtttaggtagcaaaattataatgctggctgaggcaacacacacaaacctctctttagttgatgaaattaatcaaagactttgtgaatttagagatgagcataatatgtcaacaggacttgttattgctcaaggtaagaagctctatttagtgagatataatcgtagttttaaacatgtcgatattgattttctgccaaatacacccgttccacataaattgagtgcggcaggcgcgacttatgcagtctttagtcatttagaaattgatgctgatttatcaatacagcaaaaaaacagtatacatcaacaaggttttgctattcgccaacaacccgctgaaggtattcctggggctcaatctattgcatgtcctgtatttaataggaaaggtgaaatggtcgcagccgcattgaccatgggatttattaaacctgaaaaccaaatagaattaggtaatgcattaaaagcaaaaattcgccatgtattatcttaatattgcgaatatttttatcaaatacgtttactggaaaagtaaacgtatttgaaaatagcaaaaattaagtaaatagtcctttagctaatatatcgcttgcttgtgtgacaccgggtaatacgaagtaataacccccaccaaaaggttttatatagcgctctaacggctcgccatttaaacgcttttgcgtatcaataaagccttttttaaggttattctgaaatgagacaaagacaagccccatatctaattgccctgacggcgttagccctaatgagtagctataactgcgacgacgcagtttggcactataacgttcgggggttctgggctcagctcgtctcatatgtgaatcaaagagtatcctgtcgccatgaggatcttgcgcaaattcaggtgagtccatttcttgcttcatacctatcggcgcgcctgttgcacgatgacggccaaagttattctcctgatcttcaagaggtgttctatcccaaaattccaaggcaaaacgaataagtctcaccgcttgatagctacctcctaagcaccattgcggttcattttgtttatcggtgatccacactaaatcatccattaaatgagtgtcagtggcaggggcattacctgtgccatctttaaaaccaaataaattaattggcgtttgttgattatcaatatcacgagcaggtagaaaaccatctattttccatcgtgcatgcacttgcccagaaagatattttaaaatatctcttaatgcataaatgatactttcttgactattggcacaaagctgaagtaacagatcaccgccacaccatttaggatctaagcgatcgttggggaagggtttcattgcttcaaggcgtttgggtttatgagcttgaaaaccaaaccgattatcaaaaaaactatcccctaacgccactgtgatggttaattcatcaggatataattggctacctaaaataccggatcctgcggggggaaggtgaggattatgactttctttaagttcacgagattgtgttaaaaaagcaatccgctgtgttaacgttcggaaaattttttctacttcctcaggggttgttactgttaaatcaagtgcaataaatgaagcatgcttttgttctggcgtgataaccccagcttgatgttttcctaagtagttaatagcacgttgataacgaagtgttggtgaacacttgcttttttcgatggcatttgcgcccatactggcaagcagtaaactaccgcctaaccattttaacgttgtacgtttatggtggttaacggggattgtgaggagtgatttaaacagagttttatttttcaccatatgcttctttatagtaataatagacatcaatattgagcacgttacgtaattgtgcaacttgctccgctaattgtgttatttgtgcaaagagcacggctttctcactatcagaaagcgtatctaaaggctgaaataattcttcatctcgctgatattttaaaaatagtttgctaatagtgtcatactgtttgcgtagtgattgatattcctgaagtggaatatggttagatagagactcaatgattaggcgtgaaccgtataaattggcatacccatcccccagatcactttttgcatattgattttcaatgccggctaatttgtcggttaaaatcagctctaaactatcacctgcagattgcactaatttagctatgggaatatcttcaatcgctaagcgtttttttagatcactaatgcctcttaacagtgctttggctgactcggctgacgattgcatatcctctaatttaaagagttgatattcaaccaaatgaaatccactaaaacggggcgagttttctctttcaagaaagaaatcagcccgattatttaataggcgttcagtagcgccaaacaatgcaataatcgggcggatcacctcatagtgataatgcgcttgttgataggcgagttgggcatcagtcagttgatttttttcactgttaacaatgacattttttaatgcagtttcaactaaggtcaactgatcaacagctttctgccgatagttaagaatattggttgtaaatttttcaggagtgggaatatcccctttagcaacaacaatattttcactatcttgagtaatgccttgaatgattttttttgcagaaacagaaaaagagcatagcgatatcaatagcaagatgacaatatgatcacctttcaatagggcgctatttggcatgacgatccccttgtttaaataacagtgcgaccaccaaccaaaacacaataaaagtaacaacacttaaaccgatgggttgtgagcgataagcaaagaatgaaactaagaaattaccaaaaatgcttgaatcatccaaaatatggctaagatcccatagtggataaatcaaaaagtcaggtaattcaatatccatttcaataagtagattagctatctcttctactgcttttaatagcaaggaaacggcgaggaaaagcagtaaaaatccggtaataacaaagaatttacgccaagaaatcatttttgatgttagcaaaaataaccatagagttagtcccgctatcaataggccaatgaatacttcaatcaagaaagacaacgcggtttgtgctgtgagagccataatatggcttgataggaaaacaaccacttcgctgccttctctcgcaatggcaatggcgatgatcagtaaaatcccccagacactttgttgttgcgttttttgtgtcaattcgttttcgatattggcttttagtgatttaccttgtttgttcatccaatagaccatctgaacaattaataggcaggcaatgatttccatcataaccataaacagagattgccagatatcttctaaggagctaaataccccataaatgctaagagctaaaagaatagagagtagtattcctactattactcctccccagagatatttcataccttgtttaggggtaggagagcgttttatccatgcataaatgatccctaccaccagcagagcttcaaaactttctcgccaaacaacaaatagaacttgtcccatatttattcagccttttcagtcgcaacgatttcaccttgagggtgagacagatgaaaatcatcaaagaaggtgtaacgtccaggttttagaggcgcaatcacaacgacagaactcgccccaggcgctaatactttttctttacgtaattgagtgctttcaaattcaacggggctactaccggtattgcgaattttgatccgtataggagttttagcaggaacatttaaaactcgagggatcagttccccctctttcatttctaattcaacggtgtatttttctgcggctaaagtagagcttgctatcattaatagcagtaatagcgtgtattgatagagatgtttaatcattgaaatttcacttaacaaaacagaggagatagccctatacacagggctatcaataattaagctaattagtaactgcctttacgaccagtaccgctatagttaaaatcccatgacacttcaaaaggctcgaaccaagcggctacccccgtctctttgtcgatatgacgaccaaaaacgacatctttattgtaagaaggcgggtaaattttataggtaacgttatattggccgttgccatctaattttaggttttcaccataatgaggaccatcactggcgaccatggccataaaagttccctgctgttttttctccggtgcatctaatttagtcacggtatattcaacagtgagataagggatccaatcaccttcagcaaaaccattcggattatcttcaacagcatgaatatctgcttctaaatggatatcagctttatcagcaggtaggtgcttcattgcatgatggccttcctctgtgtccatcgtgataggttgtagatagacaccttgaatttccatgccatttttaatgattggttgacctacgggatactcaagagcgaagacagaagtgggaattaatgataacaacgtgagagcacgcacataacgagagttcatgtttaatccttatatattgaatgataattgttattattcttattaagattaacatgatttatagcaaaaatagcagaaacttatgtaagaaaaatatcgtttaatttgaagtgggaaaggataaaaataagattaactaactcttttttaaaagaaaaaattttgttattaagaaatgatagataaatatactcaataggtttgctttttaatactaagtaaaatcatagtgttaaagagaatagatggaaatcttattaactatctgacaaagataagcaatcactgatttccatattagatcattaaatttgactctgtgcgctccaaaatcttgattgtggcgatttagctaaaactgattgaattgcatcgctcaccacactgccttttttaagacaattgataggttggcggtagaatgctgagcgagatagcaatgtcaactgacaagctttactgactgataagcctgcattatttaatgattgagcgcagaacttcttcttagctactaccaacccttttttacaaaaagatccttcattgcataatgttcaaggctaactgctacaaacatctttttaagtttggcattttcctcatcaagatcttttaatcatttaacatcattggcttccataccaccatactttgatttccaattatagtaacaggcattactgatcccgttttcgcgacaaatatcttcttctttcataccaaaatcagcgagttttaaaaattaacgattcgagtttcagtgaaaaagatttttttcatcatgacttatacaataacctaattatagctgtctcattttaggggaagtggataatctgtgatagatattttaatgtaattttaaaattattctgttaatatcattatagactgaattaaatagagtggttatgtctgacgtaaaatacttaaccttaaaaggtaaaaaaacaaggattaatatcagctaattgttctacagttgattcaattggtaatagatatcaaacagtccataaagatcaaatacaggttttaagtttaaattacacaataagcaggatgcaaaattcagtccaccatccagttttattcattaaaccaattgataagtcatccccgttattaggcgttgccatatctaataatgaattattagatgctaattttgactttttcaggataaaccaatttggtattttagaaaaatattttgaaattaaattgagtaatgcaactattgtggattttacacaatcttcaccagaatcatctaacggatactctatcgtctcccatgaaaaaatattactacgatatgagtctatttcatggaaccatatttgtgctggtacaagtggatattccataaacgagcaaaatattatttgaagattttataagttgctttacgtaggtaatagtatattttttttagatataggagtagtaaaagtgaaaacaatagccctgcgacaaatgatgattcaggtaatctaaacatagccagtaaaaaaaatgcaattacgctatatctgatactatcaagaatcgatacgaaaaaatttttcatcacttaattaccattaattataaattaatccatttattgctcgataaacttcatcaacacttttcttttcagatcctatcatatataaccattttgatatatttggttctactataaaataccccatttctaaattcattaaaacaaggtcataatacagagtaggattgctatagcgtaatctttcctttgcttgagaagccatctctatgatgccataccctcccacaaaagccattgctatatttccaccacctctaattaacttgtgggcaatggcatttcttagtaccgtattatatataagttcagatgcggctgtggctatgtaaacacgaactcctcctgttgttactagtgccccagatgtaaggaatacacctcttaatagggttttaagattattcatttcatcatcgttcagattagtaaaaaggtgttctaagtatcttatgataattgctcttattgggttattacctttaaaagtttccttgaccattaaaaaaaatctatcatcttcatattttatattttatattttatattttatattttatattttatattttatattttcatagacatcttcatagccatcaaaaaaatacgatagattcctaacagatctatcaaaccccaatcccattgtttctacataaccagctgctagttctcttgttgattcaagccctttatctaacactaaagcgactcgatatagagcattattgagttcgtcgttgttgttgttcatatttttaccactttttaatgttatggttattaagtgagttcagatgttattagataactatttttattttagcaaaaaaataacctaatgactcaatgaggcattaattaaattggagcaaaacgacattatctgttttgttttttctgttgaataaaggcgattcgcttttttaaataagcacccttcaatttggattaaaagagcccaattttttgggtgctgttcaacaaggtgggggagttactaacttgtatttatattgaaaaatgcaaaataataccttttgcgaaaaaattcactatagatcctaattaacggttatttaggtcattaaatttgactctgtgcgctccaaaatagcttagattgggtgacagcgcttgaagaagcgataggatcttcattaagcggtgaaggaagaaaagcggttggtgtaacatttaattctttagcaataaggaagagcatatcaacatcaattttacatagcccattctcatagcgtgaaaattgctgttggctaacgccgactctttcagccactgctttagcggataaacgtaagtgttggcgctgttggcgaattttatgtccaataatttgagaaataggataaacttttgacattggtgacctctttcctcctatcaactactgataatatttcattaaatatcaatgttttttaagctgaattttaacgagctcaagctctcctacttgaatgagtcaaattcatactttttgttatcggttagttgagtaaattatttatagtcacaaaattattattgataattaattttttatcctatgttaaaaaaaattactttggcagaatgaaaaacggcatttttttgatagagagtgctatatattgtataaacgcaatttttctacttatatagactcgcatttatgattgagaaggagtaaataagaaaggagaataacaaatgataaacacctctttgactgattacactcaaaaataggcgttatatattatttataacagactatttttgagtttttttgtcaggtcaaatccgcaatcagctttatgtcatcgaatcaactcgattatttttactttatctaaattgataaatttacattcacatcagatagacgatagcgttaagatggttacttataatacatggtgattataagtattacagagtcattatctaattatcgtcaaggtcgagattatgaatgtaaaagagatcattcgtcatgaaccatttggaacattactcggttatgcacctggtggtgttgcgatttactcttcagattacagcagtatagataaagaagattatgccgccaatgattcattccgtagttatattggtaatgagtatatggggcataagtggcaatgtgttgaatttgcacgccgttttctctatttacattacggggttgtttttactgatgtgggaatggcctatgagatcttctcgttacgtttcttacgaagaacgattgatgacgatattttacccttgcaagcttttgcaaatggcagcaaacagccaccgacggtaggagcgttgcttatttggcaagaagggggagagtttaaagtcaccggtcatgtggcggttattaccgaagtattagaagataaaatccgtattgcagaacaaaatgtgatccacactaggttaccgcgaggtcaacaatggacacgagagttaccacttaaagtgagtgataatggctattttatcgaagatacctttgataataccaccttgctaggttggatgatccaaacagaacctaatgcctacagtttacctcaacctaaagttgcccctgaattgttagctattcatgaggccaaattagccaacaaggggcaatttgctggaaaatggctagatgaaagcgatccgttagaaaaagcctatgtgctagcacagcacggtcatacgattaatcaagacagctatgaatatttcaccatttcagaaagtgctgagcatgaacttatacgtgctagcaatgaaatgcatttgatgtatctgcatgcaacggaaaaagtgctgaaagacgataatttactgcgtttatttgcgatccctgaagtgttatggccccgtatccgcctatcatggcaaaatagacgtcatcaaatgatcactggacggttagatttttgtatggatgagcgcggtatcaaggtgtatgaatataacgctgattctgcatcttgccatactgaagccggattaattattgaaaaatgggctaaacagggtggcattaaagcaggttataacccgggtgaacgtctattagatgcgttatcagatgcttggaaacacagtgatgcgaagccatttgtacatattcttcaagatgatgataatgaagaagattatcatgctcgctttatgcaacaagcactgactaaagccggttatagcagcaaaattctgcgtggactaaaagagctgcattggaatagtcgtggtcagttaattgatggtgataaacgtattgttgaatgtgtatggaaaacatgggcttgggaaaccgcgttagatcaactaagagaagagagtgaacaacagtcacttattcctattcgtattggtgatccggcgggagaagttcgtttagttgatgttcttttacgccctgaaatcacggtttttgaacctctttggacacttattccaagtaataaagcgatattacctattttgtggcaacttttcccagataatccttatctacttgatactgagttcactttaaccccacgtttgtcgcagagtggttatgcagttaagcctattgctgggcgctgtggtagtaatattggtttagttgatcaccaagaaaatgtattaggtgaaaccagtggtcaatttgaacatcaagaaaatatttatcaagagttatggtgtttaccaaaagtgtctaaccgatatattcaggtttgtacctttacggtagatggacattatggtggttgttgcttacgctctgatccgacattagtgataaaaaaagacagtgatattgagccattaattgtccttgaagataaacactttttagcggattaatttcatcaccatcatccaatgagtaagagatcggcttagattaaaccgatctcttttttattttgtcagatcacatcccttgtaagatctgttttttcagccattgaataaaaagctgtactttagcgttactcttttcatcgcgggtaaccagataatagcgttgtgcacaaaaaaactcacaattatcaaaagggactattaattcattatttgcgagttgtttttgaattaagcgtttacgccccattgcgacaccggaatgattaacggcagcaataacagctaaatcagagcgatcaaaacaaatattacttttatttggaaataatcctaatcccatatattcactccaagcgcgccattcatcaaaatcagagttattactccaagcttgtctatcatgtaacaaagtacaattagcaaggtgatggatattacctactaattcatggcgagcagcatattcagggctacaaacaggaataattgattctgagattaaatcttcacaatagagatttttcaggtgtttatcatcgaaatagatagcgagatcgataccataaccacgaaaattaatatcgtcattgccagtaagtaagtttaattcaatagaaggatagcgttgagtaaaatcagaaatacgaggtacaagccaacattgcgcaatagaagggcgagaatacaccgttaatacgccagatatttcttgattatagatatctaaaatctcttgattaatatcttcaagtgtttttttcaatgcccaataaatacgttcaccttcttcggttaattcaatacgccgatgaaagcgattaaatagctttatccctaattctttctctagtgtattaatacgatggctaatcgcgctaggcgtcaaggacaattcctctgcggctaaagcgaatgataaatgccgtcctgttgcttcaaaagtgtgaagtcgtgctaattgataactggataagcgcttatttctcaaaatcacgttagaagatccaaacattttttattctcatttaattattattagtaacgtaaggtaataatcaagttaatgttaaggtgaaagatagccaagatgaaatctaaatgataaatatttgtgcatctgatcacctatttggcttaattgaattcatcttagtatctattttcatcatttgtaagtgtcgaatgattaatattcaatatgtttaacaataaataaaaattagggattgatctatggaaccgacactatgggtactaggtactctgattataagtatcttgctcattgtttttactataataaaacttaagtttcatccatttttagcactactacttgccagtttttttgtcggtatggcaatgaaaatgaacccattagaaatggtcagtgcaattgaaaatgggattgggggaacgctgggatttttagccgccattattggtttgggtactattctcggtaaaatgatggaaatatcgggggcggcagagcgcatcggtatcaccttacaaaaatgccgttggttatcaccggatgttattatggtattggtgggactgatttgtggtattaccctgtttgttgaagtaggggtagtgctacttattccattagcattctctattgctaaaaaaacaaacacctcattattaaaactcgccatccctttatgtactgcattaatggccgtgcattgtattgttcctccacaccctgcagcgctttttgtcactaatgagttaggggccgatatgggaacggtgatcgttgccggtcttgctgttggattattagcctcattagtaggcgggcctcttttcttaaaagtattgggtgagcgcttaccttttaaaaccgtaccagaagcattttctgatatggaaattcgtcaagaaaaagatttaccttcacttggggcgacattatttacggttttattacctattgttctgatgctgattaagaccgccgcagagcttaatatggaaaaaggcacttcggtttatattgcattacaatttattggtaacccgattactgcaatgtttattgctgcttttgttgcttactatattttaggtattcgccgtaatatgggcatgagtaccctattgaaaaaaacagaagatagttttagctctattgccaatattttgttaattattggtgctgggggcgcatttaacggcattttaaaagggagtggtttaagcgattcattggcggtgatcctctctaatttggatatgcatcctattttattagcttggctagtagcgattattctgcatgcagcagtaggatcagcaacggttgctatgatgggtgcgaccgctatcgttgcaccattaatgccaatgtatccagatattagccctgaaattattacattggcaattggctctggggctattggctgtacgattgtcactgactccctattttggttagtaaaacagtattgtaatgccacattaagcgaaactttccgtttttatagtatcgcgacctttattgcttcatttgtggcattagggggcacttttatgctttcttttgtcatataaaagagaatgacgatgaccacgatagatataaataaattaaaaaatgattatccactggtacgtgatttagtggatttaaaagaggtggtttggtttaacccaaatgttacctcaactgaccagggacttccttatgtaggtttaacgcaaaatgatgtgatggatgcacaggcaagattacaacgttttgcaccttatttaatgaaagcctttccagaaaccgcatcaactgaggggatcatcgaatcagccgttgtggatatccctcaaatgaaagaggcactagaaaagcgctataacacccttattgagggacaattgcgtttgaaaaaggacagccacttacctatttctggttcaattaaagcgcgcggggggatttatgaagtgctcactcatgctgaaaaattagccatagaggccgggcttctgaccacagaggataattatgaaaaattattttctgatgaattccgcaaattttttagccaatacagtattgccgtcggctccacgggtaacttaggaatgtcgattggcattataagtgcaaaactgggctttagcgttagtgttcatatgtctgcggatgctcgtcaatggaaaaaagacaagctacgcgctcatggtgttaatgttgtggaatatgagcaagattacagtattgcggttgaacaaggacgtaaagaggcagaaaaaaatcctcgttgtttctttattgatgatgaaaattcaaaaacattattcttgggttatgccgtcgctggattacgtttaaaacatcaatttgaaacgcttaatattccggtcgatagtgaacatcctctgtttgtctatctgccatgtggtgtaggcggagggcctggtggtgttgcttttgggttaaaactggcatttggtgatgcagtacattgtctatttgctgagccaacccattctccttgtatgttacttggggtctatacccagttacatgatggtatttctgttcaagaagtgggtatcgacaatattactgcagctgacggtttggcggtaggtagagcctctggctttgttggacgggcaatggagcgtttgattgatggctattacaccattgatgatcaagagttatataacttattgagcttgttaaacaaagaagaagggatccagttagagccttccgctttagcaggaatgacaggggctattcatgtttctcaagctaaagattatctacaaggtttatcacttgatagtcaaaaaatgcacaatgcgacgcatttagtatgggcgacggggggcggtatggtgccaactgatgaaatgcaaaaatatcttgcgcaaggggaatagcaaccatataacaataaaacaaataataacattataaaacaaaaggataagattataagcttatctgtaatatcacttctgtatttacaccaggatgtcacatcaggggaagatgctgtagtttataacgataaaaaaagaggcacccattgggtgcctcactcactaaaataaaagccattattctaagataaacatcccataaggatggatttgtagataatagctatcaccttcattaggttgaagttgggttgcattcacttgtaataacaatgtttgattttgccatgcaacagtcacctcatattgtggtcccatataggcgacatggattattgtacattgctgacaagcttcaccttgttgagataaggtaatagcttcaggtctgacacccactctaatttcggttttgttgctgttaaagttctcggggcgaggtaagcgataattaaaaatatcaacataatcagcccctagagtagcagggaagagattggcatctcccataaaacttgccataaactcagaggccggttggcgatataaagtttgtggtgaacctaattgcattattttgcctttattcatcactaacaccatatcggaaacggcaaaagcttcactttggtcatgggtaacatacagggaggtgatattaaactgttgttgtaattcacgaattttctccctcatgctacggcgcaagttagcatccagattacttaatggctcatcaaataacagcactttgggttttaagatcaaagcacgagctaatgccactcgttgttgctgaccgcctgaaatctgatcgacaaaacgatcttcaaatcctgctaaatctaccaaggctagagcctctgccactcgctgtttgatctctgcctttgggcgacctaacatttttaagccataaccaatgttgtcacctaaagacatatgagggaacagggcgtaagactgaaacaccatacaaatatcacgttgttggattgagcgatcagtaacatcttcaccatcaataaaaattttaccttctgttggtttttctaatccagctactaagcgtagtactgtcgttttaccgcaacctgatggccccaataacgaaaccatttttccttgaggaatagataaactgagagtgtcaattaccgtgtttgtaccaaaacgcttaacaatatttttcagttcaacgaaatgtgattgtgtcatgatttatactccgtattactgtgcatttttggctttagagcgtgaaacacgggcttcgccaatcaaatagtcaaataagaaaataatagccaacatcacgatgattaaaatcgagccataggcaattgcgacgccgtattcaccatcctcaacacgatttaaaatataagcggtagcaacgcgagtttcaggggtgactaagaatacaatcgcactgacggtggttatcgcgcggacaaaactataaattaaagcggataaaatcgcggggcgtaataaaggcaatagcacatacaaaatagttcgcattgaatttgctcttaaacttaatgacgcctcatccaacgatttatcgatttgccctaatcctgcaatacccgctcgtattcccacgggcacgttacgcatggtcattgagataatcacaatggctgccgttcctgttaaataaaacggtgaatcattaaatgccaagatataagagacccccgcaacagtaccgggaacggcaaaacagagcatagtcgtaaattcgatactctttttacctttaaaatcttggcgcacgacaatataggcgatcaaaagccctaaaatagcggtaataggtgctgcgatacccgcataaagtaaggtatcaagtaatgatggccatgcgccatcgctcatcccttgaccaaataatttaataaagttatcaaaggttaaggtgtaatccacaccccagttaaccgtaaaactgccgtagaaaatgctgccatagagtaagatattaaagataacccaaatacccaacacgctagtgacaaaggttactaaggaggtgggtaatggttgaacatcaccacgataggatttacctgacaccgtgacatatgagcgtttgccaatccacatatattgaatgcagaacactaataatgagaataccaacagtgaagcacctaacgtacttgctgcttggtaatcaagttgagagccggtgatatagaaataaatttgagtggcaatcacgtcaaagttgccacctagcaccaatgggttactaaaatcagccaatgattgcactataacgatcaaaaaggcattggctaatgctggttttagtaacggcataaaaacatgaaagaatgtttggtagcgattagctctaagggtataagaagcctcttctaatgacggatggatagttttaattgcaccatctaagatcataaaagacataggggtaaaggcaagtacttgtgcaagccaaattcccgtaaagccatataaccagttggtattttctaaacctgcataagttgccaaaaattcagtgatataacctgaacgtcccatcatcaaggtcacacctaaacccacaacaaaagggggagtgacaataggtaaaatagaaaatactcgaccaataatcgctgatcttactgcaatacgtgatgtataaatggcgaggatcaaaccaaaaaaagtacagccaataccaactgcgatagacagtaagattgaattgatcatcacctgaacaatatgggcttggctgagaatggcaataaattcaaagggggcaaaattgccagcactatcttgaaacatcggaataaagatagcgacacttggaaagataataaaaacaccgattaaggcgacaactgtgattaatgagccaatcacaaagctatcaccccctaaccactctaagcgtgttaaagcatgcttggctatcattcctaatgaaataaatagcacgataaccgaataacccagaccacgaccttccatcgttgcggtaacaatagtgataaaggcgcagaaaaaggcaaaacttgcatcaaaatagtggcgaatacgattttctcgccctacaggatgtaaaggacgaattaatagtatgctgggaagtaaaaaccagagcagactgatatttaagttactccagccataagaggtaagtaattcatctgcggtagaatcaaatagaccataatcaaggctccatgaaggcattaatataaatgccatccatgcaatcaggatccataaaaatatgggatcccacctctttttttcagacaaagcgagtgtgtgagacataaatcccccgacagtaaagctcattattattatgtaaaaaaaagagcgagagcatctctcgccctattgataggctatttacccatttttacttcggtaacccatttatttatcagctctttacgaacatcactatcgccatatttatccatgtcgtagttaatcagttttaagtctgataatttcaaagccatcggggaagactctgccgtggtattggtgagaatttggtaagatttaccctctttccaactaatttcttgtgcttctttagagagtgtccagtctacaaataacttagcgttatccatattacgggcatttttgatgatactgacaccgccaatttcgtaacctgtgccctcacaaggtgagataagctctagtggtgccccgttttcaacttcgagtgaatagtcgtgtaagaagccgataccaatcgcggcctcaccacgggcggcgttacgcgctggtgcaatacctgatttagtatattgagagatattggtatttagttttttcagataatcaaaggcttgctctgttccccataattgatcgaaagttgctaatgcagtgtatgcagtgcctgaactttgtggatcagcgatttgaatttcacctttgtattcaggtttgactaaatctttccaacaggtcggaataggtagacctttctcttttaaacgatctttattgacaccaaaacctagaataccgacataaaccgcagaagagtagtttcctttgcgtttagccggatcacgaaattgtggcatgatctgatcaagattggcggatacataaggctctagcagatccatttcacccgcttgtgagtgaggatccattgttccgccataccaaacatcagcttgtggattgcgtttttctgcttctattttcgctaatgtactgccggagccattacgaacaaaagtggttttaacatcatacttttcagcaaaagctttagtttcagcttcacacatcgcatttgtggcactgcaataaaccactaagcgacccgcagcactggtggataaacttaccgtagaaagagctaagccggcggcaacaagtgtagagagagttttcagtttcatgttcagaaccttttaaatgtgtcgtcatcggaaaatgaaagtgggccaactaaatgctcacgtttactgacatcagcgatcagcaatggcattagtagtagtcccattaaggccgcagcactggttaataatacaaacatcccagtccaaccataatgcgccatgacctgacttaatggccaacctgctattgcagcccctaaataggcatacaatcccaagtagcctgttaccgtacctgctgcgtttttatgacaatattctgtggcagcaagtccgattaacatctgtggtccaaacacaaaaaaaccgatactgaaaaaacaggctgcaagcaatgcataatgatgaattggcattagccaaagtgctgttactgcgataaaaagcccgagtgaaaacagcaatatcattggtgctcgttggccacggaataataaatccgagccccagcctgaacataacgcgcctaacaatccacccatctcaaaaagagaaagaatggcattagcacttaacaagttagcgccatgggtttctgataaccaaatatttccccaatcatttatcgccatacgaatgagataaattaaaatataagaaaaacctagtaaccagatcattcggttaaataagatgctttctttcaaaatggttaacataggggtcgaaggcgatacttgctcttgacgtaattcaaaaatatcgcgccgccatacacctactgtgggtaacccttcttctgctggtgttccttttagttgcatacaaagccataaccccataacaatacctattaggccgggaataactaaggctatttgccaactaaaatgggttgccaaccaagcggttaaaaggggaatactcatcccgccaagattgatggagatattccataatccccaccagaaaccgcgttcattacgtgaataccaatgggtgagtaaccttgcacaagggggccaaccccatccttgaaagaaaccattaagtgcccagactaaaagcaaggcaggaaaggataaacagtaggcaaaaataatattcatcacccctgtcattaccagacctgcgcccataaaccaacggtagccgtattggtcatggaaaataccagagagaaattttgatagaccataagtgagataaaacaggctggctatccagccaatatcacctttatctagatgcagttccgtttgcataacgggcatcacaaaattgacgcttttacgagtcaggtaaaacgtggcatagccaatgatcatcgacaacattaaatttttacgccaaaaatcataggtcttatttattgatgccgaatttttacctaacataacatcctctctgatattgccaatgtaagaaaaatgcagttaaaaagaatgagagaaggttgtagatgactaagactaattcctagttttcacgcttttctattgaatttgtgggtaagttaacaattattttagtaccaagctgactaattacttcccattctccccccaatgcgcagatccgctcttcaatacctcgtagcccaaaaccgttattaggttgtgtaggcaaaatgccaataccattatcatgaacaaccagtcgtaattgtgcttgatgttgagtaagcgaaatgtggatctcactggcgttagcgtgtttgctgatattattgagtagttcttgcactagtcggtagagtgtaaaaataatggtgtcgctttcaggctctgtttcaagagcataatgaaagtgacagtgaataccattttcatgaaatgagaactcatcaattaaatggtgtagtgccttctctaatgacatctcttctaaaataggcggccttagttggcgtagcagttgtcgggtagattgatgtatttgttgggctaatcgctcaatttgctcgcctgactgacgtgttttatcgttatctgcacttctttttactaacattgactgaatttgaatagctgtaatattttgtccaatttcatcatgtaattcacgagcaatggcttttttaacatcttcttcggtatgtactagttgttccatcaacgctcggcgtgcttgtaactcttgctctaaacgtagctgataatgacgtaaattattggcaagttgttgctggcgactaatagctatacctaaaccaataccaattaaggcttgggttgttaaaaacatctctaattcatgcaaatcggcaaaagcaccatttacttgtctagcaaaggtaatcattaaactacctaacaacgcggataatacgcccccttgccaaccataacgataagccataaaaacattaggaataaaaaccagaataactaataagcgttcaatttctggggtaagaaagaattgtgcacttaatccaataagacaaaagagaaatacccacattaataaggaggtacgcaatggtggctcaggggtgatttcggcgattaatactcgactttgtaattcgcgtaaatattcataaagtagaaaaacaaagggagccaataaaataccacctgttattgaggttaaaaatattgcgctggtggacgtcgtgagaaaaaaactgagtaggaaggcttgtaataggctattaaatccgaccgctgcgataagtaaggttaaccgttgccaataaagtgggtaacgccaccagatccgttgtacctctagtgcgactaataagctgattaaaggtgagagataaagagttacatgggtaattaattgctgttgagttagccagtaataaagcccccattcggccaataacatcggcaaccaaaaacgtcgccaaagtaaaataaataatgccagccgtaagccttgaggtaaaaaaagtgcggcttgttgaccattatgactaagataaaaactgatcacccaaagtgacaaccagagtaaagagtaggtcaacaataaaaagagagattgaagaaaaaaacgtgcgcctctttgcatgttagagtgttccggtgattaactgattgtttaatgcaaaatggactaaatcaatggttgtttcacagttcaatttacccagtatattggctcgatgaacatgcaccgttttatgactgagattcagttgtacggcgatagctttaacattaataccttgtactagcagattaaaaatctctctttcgcgaggggttaaactatgtaaagcatcttctttttctggtgtctgtcgaagtgctttcatggcatcagcacagagataacagcccccttgatacacagcacgtactgcttgaacgagctcttgtggaccacagcgcttagttaaatagccatgggcaccggaatctaaagcgctttgtacaaatgcgggggtatcataaatacttaaaataattgtccgaaaatcagggcgtttttgttttaatcgactttgtaattgtaggccactctctccaggcatagagagatccatcaccgccacatcaatattatcatttaataaatagggccaagcttcttggccatttgcgtattcaccgacaatattaatatccggctctagcattagcagttgtgcaaatccagaacgcacaacaatgtgatcatcgatgagagcaacgtttatcatatttttattaggctaagcattgttaggtaatatttatctgttttataacaagctacaggaagttatgcgagaaaaaagggagcaaaaacacgcttttgcgctttgtctctcgcttttagcgtattgaatcgagacaattagcagggcagaattaccccctcacaaacagggaacctccatttgtaagggggataggcagattaagcgacttgaacgggaacggctttagcaatgcgtttcatttcattgtcgccttcaaaataggcaatgttgggtttatggctacgcgcatcgctatctggaatttgcacataagagcaaataattaagcgatcacctacagcagcacggcgagcggctgcgccattgacagaaataataccagaccctctttctgcgcaaatggcataagtagagaaacgttcaccattatcaacgttataaatatcaatggcttcattttcaagaataccagcggcatccataaaatcctgatcaatcgcgcaagagccttcatagtgaagatcagcttgggtgacttttacgcgatgaagtttgccttgtaacatggtgcgtagcattgttgcgtttcctatttttaattattcattagactaagctaacttgttggctatcgattaaacgagtgttacccaaccaagctgccattaaaataacggcacatcggctctcttcgctaagtggtgctagtgtttgtgcatcacaaataaaacattcatcagcacgaaagccttgctgttcaagggttgctttggcagtttgtaatagttggttaacatcaaggtttcccgattttaattgctcggctatctgttgcatagcttgataaagcacaggggcttgttgtttttcattatctgataacaaacgatttcgagagctaaatgccaatcctgttttatcacgcacaatagggactggaataatactgatatcaaaacataaatcactgaccattttttttatgatctgcagttgttgataatctttttcaccaaatagcgcgacatcaggctgtacaaggttgaatagtttacttacaacggttgttacaccgcggaaatgtcctgggcgactagcgccttctaacacagaagaaagtactggaacctcaacaatcgtttggttttccatcccatttgggtacatctctttcgctgatggggcaaagacaatatcaacatgtttatcgcgcagtaactcacaatcttcttgtagggttcgtggatagtttgctaaatcggcttctctatcgaattgcattggattaacaaaaatagaggcgataaccacatcagcatgaatacgcgcttcttctatcagttttaggtgaccttgatgcaggttgcccatggtcggaaccaatgcaatgcgtttaccttcttgttttagtcgcttaatttcgcggcgtaagataagcgttgtttcaataattagcatagcgtgactcctttaaactattttaatgaatttaaatgataaatcagttaaatgagtgttgttcttgagggaacagtttttgttcaacttgttgaacatacagtctgacagcctcgggtaaggagccagcttcttgtaagaaatttttagaaaatttaggggcattaggtgttagacctaataaatcatgcatcacaagaatttgtccatcagtgacattgccggcaccaatgccgataacgggaatattgagtgatccggtaatagtttttgctacggaaacggggacgcattctaatacagctagttgtgctcctgcggcttcaagcgccatagcatcttgcttaagttgctctgcagcagcttcttctcgaccttgtactttatagccaccaaacacattaacagattgaggggttaagcctaagtgaatacaaacaggcactgcgcgttcagtgagcattttgactgtaggaataagccagcttcctccttcaattttgaccatattcgctcccgcttgcattaaaatagctgcgttaagacaggcttgctctggagtggaataagacataaaaggcatatcagcaattaagaaagcgttaggggcgcctgctcttacacaacgggtatgataggcaatttgctcaacggtgacaggtaatgtgctgtcatgaccttgtagtgtcataccgagtgaatcaccaattaacatggcaggaataccttcattggcaaatagacgagcaaagctagcatcataagccgtgatagtggcaaactttttcttttcttgtttatagcgattgagcgtagatagcgtaaccggcttcatgataataaactccatggtgtgttgcgtgtaaattgagttatttatgtcagttaattatttgtttattaaagagaatatggcataaataaaaaacattaactgctgattgtagcatctacgtactaaaaacgaagaaaaagtcgtgaattgaataataaaaaatagaaataaaaaatattttgatatttatccaagaattagaaatggtgatataacaggcgggagggaagggcgtattttatcacttatggggagggataacgcgataaaggaacagtacaagagagttgtgaacggggttgatactgtcagtcaacagcatcaaccattaacatcaaacacgcttattatgtggtatcaccacttttccataccatttttaggtacgagcgctaatctgtctgctaatcgttctccgtcatcagggaaacaaagttcaggtgctaaatccgccaatggataaagcataaattcacgcaccttaagtccataatgaggcacagttaaacgttcggtctgtataacttgatcaccaaataacatgatatctaaatcaagggtacgaggtccccaacggttacctgcttttctttcacgaccatgggcaagttcaattgcttgtgtatggtcgagcaactcttctggggctaaagtagtatcaacggcgacagccatattgagataatcgggttgatcttgaggtcccatagggcgtgtgcgataccaaggtgattgggcaatcagtgtagtattagggatttcactaatcgcttttatcgccgattttacttgctgttctggtgagtttaaattactgcccagaataatatacacacgctgttgttgcttactcatgtttgttctcttgtcttggtgcattattttttgcattagggtgacgaggacgtttacgaggacgtgttcttttgcgtaccgggcctggacctaattcagagaccatagagcgttgttgtgtattgtttgaaatctgaaaatcagcccaccaagcggctaatgcttccagatcaggatttctttgtacattagcgcgtaattccagtagatcaaatgctgcacggaatttaggatgctcaagcagtttattggctcggcgcccttgacgcttaggtaaacgctgctgtaattgccaaatatcacgcatcgtggtggtgatacgtttagggatcgcaatagtacgacattgctcatctaaaatatcattcatcgccattgagaaagcatcgtaataagacagtccactttcttgagccagtttttcggcatgctccactaagggataccatagcattgctgcaaataagaatgccggatttacgcgcatttctttactaatacgatagtcggtattctttagcacctgttcgatcattctttccattggggtatcttgctgctcagtgatccttgaggcaactaatggaaaaagaggctctaaaagttggaaatggcgcattaaccgataggttttataaccatgtcctgtttgtaataatttcagcgattcttcaaataggcgtgctgaaggaatattacgtaatagtggtgctaattggctaattggctctgcagtttccggtgcgatacgcatatccagtttactggcaaagcggatagctcttagcatccgaactggatcttcacgatagcgagtttcaggagagccaattaaacgaatagtacctgatttaagatcagccaagccccccacataatcacgtacagcaaaatcatcgacgccgtaatagagactatttaaggtaaaatcccgacgaatggcatcttcttcaatcgatccgaagatattgtcgcgcagcaacataccgctttgtgcttgttgtgactgattgcgatcggatgtttcatgatcttcatgagagccacggaaagtagcgacttcaatcacttcggggccaaacataatatgcgctagacgaaagcgtcgacctactaagcggctattacgaaataatcgacggacttcttctggcgttgcattggtagcaatatcaaagtcttttggttttttccctaataatagatcgcgtacaccaccacccactaaataagcctgaaagcctgaattattcagacgataaagaacttttagtgcgttatcactgatgtctttacgcgaaatcgggtgttgatctcttgggatcacagtcattggcaaatcactcccgttcgccttttcgttattacttttgttcttacggggacggtctgcggatagggcaggacgccgacgcacagtcgtttgtgtttcttttttaggtcggtcagatgcagtgacaggcctttcactcgctaccgattctgtatctgacgatgttgtttgtcgtcctagcaaattacggcagaaatgcgctactcggttaaaaatatgacacctcgaataattaaatctaataattaaaaaattaagcggctaatcatagcctactgaacattttttgagaatgctttgtgtgggttattgtgcatcttcatcataatgttaacgaataatcttgcctgacagcaacggttgacgaggtaagaaaatgtgctccatcaatattattccttgcttatggccatcagctatagtgatagaattatacgcaaataacttctcttttatgtgaataaacatcgtcatcacagtgcgaatagtctgagttattgtatcaagaagtattaattggaggatgatattattgatgtgaaagcgccaacgctcataatttgtgtcagcttgaagataacgagccaatgctgtaaccaaaccaccaaaacaaagttggtttattaataatggcactaaatgcctaatacacactgtcatcttgggtattaatgtttagattaaagccccagcacctaagtactgaggctatactcattaattagccagccatctgtttttcacggatttcagctaatgttttacagtcgatacagagatcggctgttggacgagcttctaaacggcggatgccgatttcaacaccgcaagactcacaaaagccgaagtcatcatcttcaactttcttcagtgttttctcaattttctttatgagtttacgttcacgatcacggttacgcagctcaagactgaattcttcttcttgtgcagcacggtcaacaggatctgggaagttggccgcctcatcttgcatatgagtgacggtacggttgacttcatccctgagctgattgcgccaagattcaagtattagcttaaaatgcgctaattgggcttcgttcatgtactcttcgcccggtttttcctgatatggctcaacgccagcaatagcgagaatgctcatggacgatgttttacgcttttgcccttcttgcataatgcttctcctacatacgcattttctgaataatcccccaccttaaataggaagggaaaaaaatagggcgctataaatagcagatgcccgcgcggatagcaattattcctttaataagttttctcatgatgtgaaggcacgcaagtaaaaaggccattttagttaaaaaatacttaaccaacaccatgaaaatgtattaaccttttgaaataaaaggtaattgctttccaattgttaaatcgtactcactaatattgatgcgataacataaaatttcaaccccagcatcacatgcttgttttagcaataagtcatacttagggtcaatctctttagcaacagacacttgtgtaatgccagtatgggggacagcgtaaaataagatagcccttaagcccgattttgcgatagcggtcaactctcgaaggtgcttttgacctcgctctgttttagcgtcaggaaaatagcccattccagcatctaataaagtgaccgatttcacttcaatatagcagtcaactttatgatttgacttaagtaaaatatcaatacggctattctcactaccatacttcacttcgcgtcttatctcatcatagtcagataattctggaatatcgccagcttctatcgcatcggcaatgatcgtattagctcttaaggtattaatacagatccaatcacctgattgagtttgggttaattcccaactatgaggatattttcttttgacattcgatgacgtggaataccaaaccgtatcacctggagttgcgcatcccgtcatcgcacccgtattagcacaatggagcgtgaattcttcaccatttgccgtcactacgtctgctaaaaaacgtttgtatcgttttaataaagtggcagattgtagtggttgttcaaatttcataatcaccctggtgaaaatacgtcctttaataaagggctaatgctacaatgagccacagagaaagttaatcagttatggagcttgtgtgcatctattgccaatttttgaggtagcaggatctgttgttactgcattaaaacaatgtccccaagtcttacttcacgcccccacaggggcgggaaaatcaaccgcactgccactgtatttgcttcaacaaaatatatttgatggcaaaattattttattagagccaaggcgtattgcggcaaaaagcatcgcttatcgtttagcaagtcaactcaatgaagaggtgggtaaaacggtggggtatcgcatgcgtgctgaaagtaaagtgagtcagcagacgcgccttgaagtgatcaccgaaggggtgttgacacgtatgttacagcaagatcctgaactgacaggtgtaagtttagtgatacttgatgaatttcatgagcggagtttgcaagcagatttagcattagcactgctattagatgtgcaatcaggattacgtgatgatttacgccttttggtgatgtctgcaacattagataatcaaaaattaacttcactattgccggatgcgccgatgattagctctgaagggcgtagttatcctgtttcacggcactattatcctattcaatcacacctgccttttgaacaagaagttgccacgatggcgcgacgtttgcttacacaagagacgggctctttacttgtttttttgcccggtagtgcagaaattattagagtcgcgcaattattagctgacaaagtggataaacataccttaatttttccactttatggggcactttcattagcacaacagcaacaggccatagagcctgtagaaaagggatatcgcaaagttgtattagcaacaaatattgcagaaaccagtttaacaatcgaaggtattcgcttggtgctcgacagtaccattgaaaaacgtgcccagtttgatttaaaaagtggtgtaacaagcttattgcgccaacgaataagtcaagcttcacaaacgcaaagagcggggcgggcaggacgtcttgaagccggaatttgttggcacttaatcagtcaggaacaagctgagcgcggggcaactcaccaagtacctgaaattttatctagtgatctctcttcgttatggctttcaatattgcaatggggatgtcgtgatataaaccaactctcttggttagatacacctacaccagcagcaataaacgcagctaaaacattattgcaacgattaggtgccattgataatcaagggggattaacctcgcggggagtacgtatggcacagtggggcatcgatccccgattggcggcaatattagattatgctagtgaaaaaagtgagcatcatcttgctaccgcagcaaggctgtgtgccattttagaacagccaccaagagacagagagattaatcttgaatggctgatccaacagaaaaatcatcaatggtcacagcgtgaaaaacagctattacagcaatgcaaagggcaatgtcgcccagaattattagcatcactattgagtgtcggatttgcagatagaatagccaaaaaccgtgataatcaaggtcgatttcgtctcgctaatgggcaaggcgcaatgatggataatactcaaccaatgagccaatcgccgtggattttagcaccattgttgttgcaaaatgcacattatgcggatgtgcgaattttattagccttacctattgatattaatgaagtatcctctatctttccggaattgatacaagataataccaccgttgaatgggatgaaaagcgcggtacacttcttgcgtggcaacagcgccaattaggtcagttaaccgttagccaaatgccattagataaacctaataaagcgcaaatgcaaacggcattattaaattggttacgtaaacaaggattaagtgctctacccttaagtgaagagagcaagcaactgtttattcgccttgctttagcgcaaaagtggtgccctgaggccaatttacctgtattgaatgaagccgttttattagactcattagaattgtggttacaacctgaattaggcgatacccaatcacttaaggcactgctacaaatggatattaatgggataattaaaaatcagttaacttggcatgagcaacaattattgcaagagctgttcccaacacactatattgctccaacgggcactaaagtgatgattaggtatgatttagataatccgccgattattgctatcaggatccaagaggtttatggtgaaaaacaaagtcctattgtggcaaaagggcaattacctgtagtgatggagttactttctccggctatgcgacctatccaaaaaacacaagatctcgctactttttgggccggaagctatacacaagtacaaaaagagatgaaggggcgatatcccaaacatttgtggccagattcacccgcaacaacggcccccactcgacgtgtaaaaaaatggagttagcgcgtatttatacgtgctgaataacaatttgagagctttcctgtgggatagcttggaaaaatagcgacaatgttaggcttctttaccctaagggtgtggtgaagaggttttaatgagagaaactgttcatgagtagaaagaaaaaaccagtaaagaaaaccaatagaaggcgttcttggttttggttatttgttaaaatcgccattgtggttgcggttttagtcggcatctatggtgtttatttatattcccaaattaaagagcgccttgacggtaatgtatgggaattgcctgctgccgtttatggacgtactgtcaatttagaacctggcatgaactatagccaaaaagagatggtaagtttactggaaggtatgcagtatcgccatgtcaataaaatcacccgtcctggggaatttgtcgttaaaaatggcactatagagatgttacgtcgaccgtttgattttccagatggtcgcgaagagcaaattttagcgaaattgacctttgaacaaaactcattggtgagtatcaccaatatgaataatcagcgtcaatttggtttcttccgcctcgatcctaagcttatcactatgatgcaatcggctaatggtgaacagcgtctattcttagcaagagataaatttcctcaactattagtcgatacattaattgctacggaagatcgccgtttttatgagcatgatggcatcagtatttattctattggtcgtgcggtgttagcgaactttaccgcaggtagagcggtacaagggggaagtactttaacgcagcaattagtaaagaacttattcctaaccaatgaaagaacgctaaaaagaaagcttaatgaagcctatatggcgattattatggatgcgagctatagcaaagatcgtattttagagctgtatcttaatgaggtgttcttagggcaaagtggtgatgagcaaattcgtggtttcccactggctagcctttactattttggtcgacctgttgatgaactaagtcttgatcaacaagcattattggttggaatggtgaaaggggcttctgcatacaatccatggcgcaatcctaaggctgcattagagcgccgtaatgtggtactaaaattattacagacccaacaaattatcgatcaagagctttatgatgtattaagcgcacgtcctttaggagtaaaacctcgtagcgaagcgctaacgccacaaccggcatttatgcagttagttcgtcaagagctacaaactaaattaggtgatcaggttaaagatttatcggggactaaaatttttacaacgcttgatcctgtttcacaagatgcagcggaaaaagcggtagaagcgggagttgctgatttacgtaaaacacgcaaaatcaacgatctcgaaggcgcgatggtcgttgtagatcgcctcagtggtgaggttagggcgttagtgggcggttcacaaccacaatatgccggttttaatcgtgccatgtccgctcgtcgttcaattggctcattagcaaaaccggcaacttatttaaccgcattaagtgagcctgagcgttttcgtttaaatacctggttggcggatgaacctatttcagtgcctattccgggaggaaaaccatggcaaccacgtaactacgatcgtggttataaagggcgattaatgttggtggatgctcttgctacatcacgtaatgtaccaacggttaatcttggtttagaagtcgggttagaccaagtgatcaaaacgtggatcaaactaggtgcccctgcagaaaatttagaaaaagtaccagcgatgttacttggcgcactaaacttaactccaatggaagtggcgcaaactttccaaacaatcggaagtttaggtaatcgcgctaaattatcggcattgcgctccgttatcaaccaagatggtacggtgctttatcaaagctacccgcaagcagaaacaacggtttctccacaagcagcatatatgacactgtttggtatgcaacaggtggttaattcaggtacagcagcacgagcattaaaacctaaatttggtcaatataaccttgcaggtaaaaccggaaccaccaacgacttacgtgatagctggtttgcgggtattgatggtaaagaagttactattgcatggatgggacgtgataataatggcccaactaacttaacaggatcgacaggggcattgatcctttatcgtcattatttagaaaatcaaacaccattaacattaaatccacctgtaccagaagatatagcacagatgtcgattaatgctgaaggtaactttgtttgttatggtggcggcgtgcgtacattacctgtgtggacagcagatcctgatagcctctgtacaccgttaccacaagagagcgacggcgacgatagtgcggcacctaaatggttacgcgatctgttttctgagtaattattcgcaatactattgagataaaaaatatcctcctgcaatcgcggaggatatttttttgccagcaataccagcaataaatgctatttaagtaatgaaagattacgctttcattttgctaaaggcgtattcagccgcatcgatagtacgttgaatatcttctttgctatgagcaatagacataaagccagcttcaaaagccgacggagcgaggtaaatacgtttttctaacattaagtggaagaactgtttgaagcgttcgacatcgcagttcattacgtcttgatagcaagtcacttctttggcatcggtaaagaataaaccaaacataccgcctacatggtttactaccatagggatacctgcttgttgtgctttttcaagtaagccatccgctaacatagtagtaagttcatccagtgtttggtgaactcccggttgtgaaacttcttgcaaacaagctagacccgccgccatcgcaatggggttacccgataatgttcccgcttggtagacaggaccgataggggctaattgagacatcacttctttatgtccgccgaaggcgcctacaggcatgccaccacctataattttacctaaacaggtcaagtcaggatcaacatcgtaataagcttgtgcgccgcctaatgcgacacgaaaacctgtcattacttcatcaataatcagtaatgcaccaaattcatcacataatgcacgtaatcccggtagaaaatcggctttaggtggaacacagttcatattaccggcaacgggttcaacaataatacaggcgatttcttccggataattttcaaatgcttgacgtactgaatttaaatcgttgtaagtacaagttaaagtgtgtttaacaaaatcagcaggaacacctggagagtttggttgtcccatcgtcaatgcaccagagcctgctttgactaataagcagtctgcatgtccatggtaacagccttcaaatttaatgattttgtcacgaccggtgtagccacgagcaagacgaatggcactcatggtggcttctgtacctgagttcaccatacgaaccatatccatcgaaggcactaactcagtgactaaatttgccatttccacttcagcagccgtaggagcaccaaagcttaggcctttttgcaccgcatcagttacagcgtggcgaatagcggggtgattgtggcctaataccatcggtccccatgaaccgacatagtcaagataagcacgtccatcggcatcataaatatacgcaccattagcacgttcaataaaaagcggtgtgccaccaacaccgttaaatgctctaaccggtgaattgacgccaccaggtatcacttgttgtgcgagattataaagcgtttcagacttgctcatgtcagactcctaatgatgggtgagcgtaagattaacgcctattctaaagcacagtgcagatgaagccaaatacacgacaacaacattttgatttatcattgttattgttcgagttggcactcattaataaagaaaagttgtgtatcaaaaagtgcattttgtccacaacaaacttgaaggttaagagcaggtattagataatcatcacattatatcagcaagaagcatcaatttttgctggctgttttttactggattatccagtctggagtgaacaatgagtgatgatatggctctgccgttacaatttacagatgcggctgcaaataaagtaaaagatctaattgcggatgaagaaaacccaaatctgcgtctacgtgtttatatcaccggtggtggctgtagcggattccagtatggttttacctttgatgatgctatgaatgaaggtgatatgaccatagaaaaacaaggcgttgccttagttattgatccaatgagcttgcagtatttagtgggtggctgtgttgattatactgaaggccttgagggctcacgttttatcgtcaccaatcctaatgcgaaaagcacttgtggttgtggttcatcgtttagtatctgatttttatattatttgacgtcgtggctacactgccgtgccacggcgttagcaatccccacatctttctatatgctccgctcactgcacgttattggttgtgttgcagtattttttgtcactgttatttttgcttatcgagtgaataacttaataccgtccttttaaatcttcattaataatgactccggcttttcttctaatttaatattctttaagttttattatttgatactccatttatggctattattttataaaatcactatttttaactatataagtttatatttagaataatcatctaaaataaatcaatttactggtgcgagttttttaaccattttgaataaaaataagaggttacttattattaacaaaatttggtatttttcttcttgtaaatcaacaaggttacattttgttacaaaatacacattttgttacaaagtttaaatctatgtacattagtgcagtctggcttttattgatttattttcgaatatgaaagagaaaatgcatatttttttatacagatatagtaatacgaaagtagaaaatatcgactttgcaattattttacgctaagtcacttatgctatggagataaaacctgccttggtctccctctttgctttacattccttaaattttacttaagctattcttattaaatcgcagtgtgcacaggccgattttttgaaaaggatatcaacaataatagtgttgttgagaaacaatgatttactgttaatgaaggatttattatgccaactccatgctatctctctattgagggaaaaacccaaggtaatattactgaaggagcattcactgctgaatcagttggaaatatttatgttcaaggtcatgaaaatgagatgcttattcaggcattttctcatgtagttactgtgccgacagatccacaatcagggcaacctgcgggtcaacgtgctcataaacctttccggtttacggtagcgttaaacaaagctgttcctctgttatataacgcattagcatcaggagaaatgttacctaaagttgatttaaaatggtatcgcacctctgttgagggtaagcaagagcatttctttaccaccacactaacagatgcgaccattgtgaatatcgattgccaaatgcctcactgtcaagatcctaccaaatcagattttactcagctcatcgaggtcgctttatcttatcgcaaaattgattgggaacacacaattgcgggtacttctggtgctgatgattggcgagcacctcttgaaggttaatctcttatgatttatgggctctatattgagcccatatttataaaaatagataaagtatttagcttgctttctatctattttataagtgtttgccgcaataaatggagttgctatgtcaacagatgaagcaaataacacaccaaaacctcgtttaatattagatgaaccagttttatcccattcttctggaataatgatctcagcagcagagcaacgtgctcgtatacaaagacatgtcgaacttcttgatatgttagaacaagggttactgaaaacgggtttagtttttacttgccaagtagctggattagctgacgatacttttcaagtcactcaatttgatttaaacgaaggactttctgagctatttacactcactattcaagtcgtgagtactcaaagtgatattgatttttcatattatttgggaggggcatcatcacttacagtaagaagaaacggtaaaaaaattcgtacggtacaaggtctattatcgagtgcagaacaaagtaatactgatggtattaaaacttggtatcagttagagatccgtcctgaaatgtgggtgatgacacttaatcaagatagtcgcatttttcagcataaaacagtacctgaaatcttaaaacatttacttgatgaagcacatatcaaatatgataacaggctctaccaacctgaacttcatcaacctcgtcattatgttactcaaaaacgtgaatcagcttatgatttttggtgtcgtttagcttttgaagagggaattaacttttggtttgaggaaggcccgaagcttttttacagcgataatcatttaggcatgacggcggggatcactttaacttataacccacagtctgaaacagatattaccgacagtactgcaacgaaatggcgttatatagaacgtttatgcagtgatgtccgtatagataaagactataaccaaatacgtccttcctaccccttatcgcaacaaacaacagggaaaaatcatcaacaacaccctatatttgaaagttatggtcgctttcaagaagatgcacagggccagccatttaatcaactgcgttatgaacaatctcaaaaccatcgtcaaacgggctatgcacaaactaattgttttgctcttatgcctggtaagatatttaccttaactaatcatccgtgtacaagaatgaatgaatgttggcaagtagttagcgttactcatcatggtgtacagcctttaggagataacagtgaaggacaaggcactcaactttctaatcacgttacctttattccgagtatgcaagagtggcgaccaccatttcattataaaccattagctgatggtgatgaattagctacagttgttggtccagatggagaagaaatttataccaatgaacaaggtgctgtaaaagtttattttcattgggatagaagaggaacacctgatcatagtggatcgtgctggcttcgggttgcgcagggatggagtggcaatggttttggctttatagctatcccgcgtgtagggcaggaagtgattgtttcctatttaaatggcgatattgacagacctattattacgggatgtacttacaatggtcgtaatacaccaccgcttgatttaccgaaagaaaaaaccaaaaccacatttcgtagtaaaactcataaaggtactggatttaatgaactaagatttgaagatgcgggtggccgtgaagaagtgtatttgcatgcacaaaatgatttaaatattcatgtgcaacatgatagtcattggcataccgaacatgatgttaggcaacggatagataatcaaagagtaactgaaatagctggtgatgagcattttattttgaagggaacacaaaaatcattaattgaaggtaatgtttcattacaaatcaaaggcgcgaagcattgcaaagtaaatgatgcattaatagctgaaagcggtaaggaaactcattttaaaagtggtggaaaaattattcttgaagctgtaagcgaaattaccttaaaagtaggaagtagttttatccgccttaccccaaatgcaatctttacttctggaaatttagatattggatcaagtggaccaggaataggtcaagatcctaacattcaactacctgatggtgtcactccttttgaacaacccctttttgcgattaaaaaatattgtgttttaacagcaaatgaagcaggtagtttattaataaagccagctaaggacgaaaattaatgatacctttaacatggatgcaatggagtgataatatttcgcaaggagatatttatttttttatcaattcaacatttgtattagatactattaattttttttatagtaatgattggattgaagaagctattcctttatacaatagagaaactagactttctcatttagaagacataagcccttggttaattaaaataaaatctctatcaaggtatagcttagcaaaaaaaatagatgaatttttgatggaaaagtataattggggttgggtatatcatagtgaattgaattgggatgttcaaattacgcattggaaaaaccatcaaatagttatagttaataatgaagaagtccatttgagactatttgatccaagagtagcaggaatattattccctcatttaaaaaaagaagattggttttcattaatgtatccagttaataatgcatatattccatttgataatgagaatttattttttgaaaaaccaaaagagatattaaaagtacagaaagaaatttcaccatctatttatacacttcctagctatcttttagatgcttggcgtcattcaacacatatgattaatttagttgttgagaatcttattctcaacttttgggaagaaaatggtgagcttgcttattctcttttttcacgagaaaaagatattaaggaggttatttataaatgggttaataaagaaagattaagacatactgatattgcttatttaaataataaaaatttattaagttatttattagatgtaaatctaatcaaaaaggacgaaatataaatgacggataaagcagattgtatatcttgtggtaaaaaatgggttgaaatttatcttgtagatgagtttaatcagcctgtttttgatattgaatatgaattattccaagtctttggtcctatgactgaaccaagaaaaggaaaagtaaaatctgatggtataataatagaagatgaattgtttgatattccaattacgcttagattagatactcaatcgttaatagaaaaaatgagtgaaagaaagctaagaaaattaagaggagaagataattctattgttaagtcaaaagcaatagaaatgaatcgtagctatcgctatacaacaataggaccattatgcaaagataaaattgatattgataataaagaatatcaagataaatatcctttttatcattttcctgagcaagaagcatttaaaggattaacattatcaaagctaaatactgtctatgtaattgagatttgtccatttagagtttggtcattgattttgcaccatacagaacagtattctatgattaatgcttataatttaggtcttttaagtcaattaatttacaataatgataatttatatgatccaaattcagtcagaaacttttttgagcgacaatgctttgatctaagtcgctaccctgtggtcagagaaaaaaatattaaagcagaatatcctgctattgttattgatgtaccttttgatgaacgttatgataaagcgatatttttagatactgaagataaagtgcagcatggatcttatgctgaaggaagtactcaattattctatattcagaataaagaacaatttattattgcttggcgaggctctcaggaaggtactgattgggttgatgattttacttatcgttctaaagatataaaaacccatgcctccgaatttaagatagatggtaaaatacataaaggtttcttagacgcttatcaattagggaaaaaattctttcctgagagattttctgaaatgaaaaaaatgtcaagagaaagaaagttgtttatctgtggacatagcttaggaggagctttagctttggctcatgctacagaattgagtgtaaataaaccattgctttatacttatggagccccgagactatttactatctctgcactcaaacagctacaaaaatttactcattatcgtcatataaataacaatgatattgtctctagagtaccaccagaagcaagcttagataattggttatttaatatctatgggatttttggcactatattgggtggcgctatatcaattgttgatttacttggacagaaaatgattactcaatatggtgaatattatttgcaccatggtaatccagttatattttatgaagtatgtaatttaattgagtattatgatgaaaaaatacccaatgcaactcatacatggcattatagttattttaatgatcgtaataataaaactaagctttatattgtacctgagattaataaaaaaatattaaataaatcatttgaaaaagaaaaagaatttataagcaatttaagtgaagaagataagaaagcgatttttcctgaacaaaaaaatccagaaggtaatggtggtactagtgtaacagatcattatatgggcagaggctatttgccttttttacatgatcaattattagagttaattgatcatgataaaacacctaagcgtttaaaatctcgcgaaaggtttaaagtagctcttgaaaataatactaatattattaatcctgatttgtatagaaaaaaaacattagaagcatatcgtcagcgtaatttatattttttagatttgcaaaatagcatgggaaattcacttattccaatgcaagaaaacccaaaagaagttgatatgttacagcaatttaaggagcaaacatatgagatatttaatcaataattgtccacttattattttagggagcgttgttttactattatcaggttgtcattcactaacttctaagatagatacaacatttttgcccccagaaaatggtagaacagttaaaatttcggttgatgtgccggatatggctgaattattgccaatgaaagtcatgtatcgttcaaatctttgccaaaaaacatatcataataatgaagtacctaaatatacagtacccggttttaatagtgagataatagcattagaaaaaagagagaatagctcattatatagtacagagatcccttataggggaggcggaaaatgtgattggcaattaagtaatgttacattaagattgacattaaaaaagaataattcttttactaaagatattgttgatatagtaggaaccggagtaattattatttttgataataatcaacctcaacaaactggtcataaaccaattaaaataaagggtagttttgatatagtagagcattatttcccgtgggtaagtgattcatttaaaaatagtaatgatattagcttatggttatatggaaaagaacttttcctttattaccaatctcgtgatgctcaacaaataacatggaagcccatcattcatagtgatattgtggtttattctgaatatccagcagaggaaaaaacagaaggtgtaagtacaatctattcttatccagatggtacaaaaagtgcaaatagggatgggaagcctgattacaaaaaactactctctttaattaattcgtcatcgtaataattaaaataaccatactagcacaatacaagggtaaaatattcttttaaaaagatactataaataccggaagaactgtgttaattggtttttttgattgattaacacgacgataaagttatttgtttagatgatgaagtgaactgttcttatagttacatattagtcactatggaataaaaaatgaatattattaataaatattgtctttttttactatcagtagtggagatattactattatcaggttgtcattcactaagttctaagatagatacaacattttctcccccagaaaatggtagaacagttaaaatttcggttgatgtgccggatatggctgaactatcaccaatgaaagtcatgtatcgttcaaatctttgccaaaaaacatatcataataatgaagtacctaaatatacagtacctggttttaatagtgagataatagcattagaaaaaagagagaatagctcattatatagtacagagatcccttataggggaggcggaaaatgtgattggcaattaagtaatgttacattaagattgacattaaaaaagaataattcttttactaaagatattgttgatatagtaggaaccggagtaattattatttttgataataatcaacctcaaagaagtgggggaagagcaataaataaaaaaggagattttgatattgtttctgattattttccttggataaatagatcatttaaaaatagtaatgatattagcttatggttatatggaaaagaacttttcctttattaccaatctcgtgatgctcaacaaataacatggaagcccatcattcataatgatattgtggtttattctgaatatccagcagaggaaaaaacagaaggtgtaagtacaatctattcttatccagatggtacaaaaagtgcaaatagggatgggaagcctgattacaaaaaactactctctttaattaagccgtcatcgtaataattaataaaaaacagactagactaatattattgattttacttattattatctttaatagcctcacaaatctgttgagccgcataaataatacgtggtgctggtctgctaaaactatcttcatcaatagcgataataggaatatctagttgaggttgccaaaattgttgtattgcggcaatttggtttggtttaccactaaataaaatcaaatcaggttttttactgatcacttgctcgcggctgacttgtggccaaggaactgcactattcgcaaaaatattttctccgccacaaagttcggtaatctcattttgtaatgaatgttttgatgtcgtaaataggggttgcataccaaattgaataaagacttttttcttcgcttgatgaggcgtcgttgaggcgtacttttgctgtaattcttgatattgctgacgtaatttttgtgcacttgctaaagcgacttcaggatgagtgctataagaagaaagtcgggtaagatcgtcaatgatttcttcgatactgtgtggatcagagtaaataatagggatacccaatgattttaactgatcgagcggtcgttgaggattaccgcttggccatgcaataattaaatcaggttttaatagcaaaatgcgttctacattaatgccttgccagtcggcaacttgtacgagatcttttgctgcttgtggataatcagaataagcgctcgccgcaaccatattctctcccatacctgcggcataagccatttccgtggcagacggggataaagtaataacacgttgtgcgggagtggctgcgataacataacaaggtgtcaatatcaggcttagcagcagtgcaaaagtgtttaagaaacgcatttttctcgtctttatagtcaaatatacccgtctatttttatcttacctgctgagctaaaagagagacgggtttgttaagcggcttatcgattaaataaattaaaactgagtctctgtttttaatttatcaagcatagtagtgaccattaagcttgattgttgtgcggcaacagataaaaactcatcaaaacttaaatgcgattctttatctgccacatctgaaatggcacgaacaacaacaaaaggtgtatcaaattgatggcaaacatgtccaatagcggttgattccatctcaacagcgacgacttctggaaaagtacgacgaatacgtgctaatggctcggcaccattaataaaagcatcgccactacagattaatccacgcacggcatttaattttagtgatccaatacactcttgagcaatattgaccagtttgggatcggcaataaatgccggcgggcattgtgccatttgtcctggttcataaccgaaagcagtaacgtcggcatcgtgataacgtacttctgttgatacgacaatatcgccaacatttaattttgcatctaacccacctgcagagccggtgttgatcacaacatcagggcgaaaatgttcaagtaatagtgtggtaccgatggcggctgccactttaccaatgcctgattttagtaatgcaacatctacaccattgattttgccagtataaatttcacaaccaccacgagagactatttcgcagttttcaatttgttcacgcagaagtttgacttcttgttccattgcacctattacgccaactctcattgtgtcatactcccttgtaggttaataatatatagcgttaaccaagagtttatcatttatcgcaaaaacacgatataacgcagcgaattcgtttcatcgataccagaaagaggatagaaatgatcgattttaaactgaagttaaattatcaacgcaaatataacagcagtgatatcgatattgatgatgaaatgcagatctcgcgccaatttgaaagcgatcgcgggcgtattattaattcagcggcgatccgtcggttacaacaaaaaacacaggtatttccattagagcaaaattcggcggtacgaagtcgattaacccattcgctggaagtacaacaaataggccgttatatcgctaagcaaataatcggcgaactaaaaaagcataataaattagaagaatatggcttaaatgaacggattgatagcgttgaaagtttaattgaaatggcgtgtttaatgcacgatattggcaatcctccttttggtcattttggtgaagctgcaattaaacattggtttcgtaaggtgttagcacctgatgcttccatagaatttgataattgtccttttttacctattcgctattcagcagaccgacatttaaatgaattaaaacagactttgcgtcaagacttatgccatttcgaaggcaatgctcaggcaattcgcatggcgcatcacttgttaaaactcaatttaacctatgcgcaaattggctgtgttttaaaatatacacgtccagcttattggcaaggtgctacgccgaaagaatttagctatttaatgaaaaaaccaggttattactggtctgaagctgaatttgttaaagaagtgcaagaaaaacttgcaatgaaagatttttgtcgttttccactgacttatattatggaagcggcagatgatatttcttattgtattgctgatttagatgatgcggtagaaaaaggcatttttgatatcaatcgcttagtgcagttattaaaaaatgcatggagtgaaagtggtgcggtaacagaaggtgatctgtttgatatcactgttaatcgagcttttaaaaaagtggatcaaaatgaagctaagcgtagcatgcaagatcaattttttatgtatttgcgcgtctatattaccggaaaattagtaccttacaccgcctatcgctttatcaaaaacttacctcaagtttatgaaggcaactttaaccatgctttactggaaggaaagagtgctgaacatcgtttattgacaacgttaaaacgagtggcgcaaaagtgggtatttagtcaccccgaagttgaagagcttgaaatgaagggctatcgagtgatcagtgggttattggatatttataagccattgcttttattatcgaccgatgattttctaagactacataaatataatgaacatcctcattatgttattgagacgcgtttatatcataagctttcgattaaacataagcttgcttataatgaagcattagaaaaaatttacgatattaatagtgaagagggaaaaaccttagagttttattatcgtacaagattgatacaagattatatcagtggtatgaccgaccattatgcatatgaagaatatagaaaattaatggtatgtgattaatgtgtaatcgattgaaatatctatcatattgattaatgataatttttagatttttcttagagatagttacgcgttattaaaataacagaaaatatttgttattaattgtaagtatattcaatgtaaacgttatatataatagtttttagttatagaataatattaaatctatataaaagagtacttctacttgttagcataaaaatatttttcgatttcataaaaatattgcttatatcagttaagtaaataacttgttcgatggtatactctcctcatatcttattctaaatggtctagtaaacacttaattctgtttgcggagtgaaaatgtcaaactaggctgttttagagttaatccgcaatagattcataaaatttaatactatggtgcagttttattcccctaaaaaacgtcctgctaaaaaacaggtaaaaaacttggcggtaaccgctaatgcattggatgctaacggtcaaggtattgctcatgctgagggcaaaaccatttttgttaaaggattacttccacaagaaactgcacgcattcgtttgaccgaagaaaaacgccagtttgccaagggagaagtgatcacacgattaaccacaaacccagaaagagtgacaccaccctgtcagtactatcaacattgtggtgggtgccagcaacaacatgtgcctattgattggcaacgtaccactaaagctgaggttttatcacatcttattaaacgtgaaactaatgtagtcatttcagcacagcctgttattgccggtgcggagtatggctatcggcgccgagcaagattagggttacgttatcaccctaaaaagggtttggtaatgggatttcgccaagcactttctaatgacttagtgatggtcacccaatgcccagtattaaaaccacaacttaatgtactgttattgccactgtggcagtgtttaaagcaactctctgtcgtgcgtgatttaggtcatgtggaattagtgttagcagataatgggccattagtgattttgcgtcatttatcaccgctatctgagggtgataagcaattgttagatgatttttctcatcacgctcaagtgatgatatatctggcgggtgataatggtgagatcgcacaattaacaacgattgagaaggaacccttctatcagatagagggtctaaaattacactttgcaccaacggattttattcaagttaatgatgaaataaatcataagatggttgctcaagcgatagcatggctcgatttatcgccaaacgatcgcgtactagacttgttttgtggcatgggtaacttcacattacctatggcaaagcgtgttgataaagtcgttggggtcgaaggtgttcctgcactggtggcgatggcgaaaaaaaatgctgaacttaatcaattagataatgttcagttttggcatgctgatttatccgccgatttttctgctatgccttgggcacaggaaggatttaataaagttctgctagatcccgcaagagcgggagctgcacaagtgatgtcacatattgtgacgttatccgcagaaaaaattgtgtatgtttcctgtaatccgaccacgttagccagagatagtaagatattattagattccggatatcagctaacccagttaagaatgttggatatgtttccacaaacagggcatctggaatcaatggcattgtttattcgcaaataaacagatagccactcaataagtcgcagataagatttatatcgagtagggagagaatatggttgcagttagaagtgctcacttaacacctgcaggggagtttgccgttgataaatgggttaatagcttgaatttaactcatgcgaatgcggggagtgaaatcatgcaaacctgggaatactgtcatcgtactgttctgggccgtgaagatgcgcaactgttgctatggcgcggtgttgagatggttgaacttctttcgacactcagtatggataaagatagcatgagggcagcacttctcttcccacttgctgaagaagatcttattaaccaggaagttatcactgaacattttggtgaggcgatatggaatttagtgcgtggcgtaatggagatggatgctattcgccagcttaaagcgacacataccaacgaaactagctcagtacaagtcgataatgtacgccgtatgttattgtctatggtagaagattttcgttgtgtagttattaaactcgcagagcggattgcccatttacgtgaagtgaaagatgccactgaggatgaacgagtcttagcggcaaaagagtgttttaatatctatgcaccattagccaatcgattggggattggacaattaaaatgggagcttgaagatttctgtttccgttatcttcatcctgatgaatataagcaaattgcaaatttactgcatgaacgccgtattgatcgcgaacagtatattgataatttcgtcagtacggtgcgtggttatatgcagcaagagaatattgaagtcgatatctacggacgtcccaagcacatctatagtatttggcgaaaaatgaagaaaaaaaatctcgcctttgatgagctatttgatgttcgtgcggtacgtattgttgtcgaacgcctacaagattgttatgccgctttaggtattgtacatactcattttcgtcatttacccgatgaatttgatgattatgttgccaatccaaaaccaaatggttaccaatctattcatacggtagtacttggccctgaaggtaaaaccgttgagatccaaatacgtactcgtcagatgcatgaagatgctgaattaggtgttgcagcgcattggaaatataaagaaggtgctactggtgcaacaaccaaaggcgggacgggaagttatgaaaatcgtattgcgtggttacgtaaattaattgcatggcaagaagagatggctgattctggtgaaatgctagatgaagtacgtagccaagtatttgatgatcgcgtctatgtctttacgccaaaaggggatgtgattgatttacctgcaggctcgacaccattagattttgcttatcatattcatagtgatgttggtcatcgctgtattggtgctaaaatcggcgggcgcatcgttccatttagctatcagctacaaatgggcgatcaaattgaaattattactcaaaaacaccctaatccaagccgagattggctaaatcctaatcttggttatgtgacaaccagtcgtggtagagcaaagatccacaactggttccgtaaacaagatcgcgataaaaatattattgcaggccgccaaatcttagataatgaattagcgccgcttgatattaatatgaaagaagcagaaaaactgctgattgctcgttataacgtccatagtcttgatgaagtgctggcaggtataggcgttggtgatatccgtatcaatcaattagtcaatttcttacaaagtaagctgaataaagccacagcggaagatgaagacaaagaggcgttacgctcattagaaaataaaacggctacaccaaaaacaaccacgtcaggtggtggcagtattgtggtcgagggtgtcgggaacttaatgcatcatatcgcacgttgttgccaacctattccaggcgataatatcgttggatttattaccaaaggacgtggtatttcaattcaccgtgcagattgtgatcaattagctgagttactttctcacgcaccagagcgtattgtcgatgcggtgtggggtgagaattactcaagtggttattcattagtggtacgggttgtggctaatgatcgtagtggtttattacgcgatatcaccactattttagctaatgaaaaagtgaatgtgctgggagttagtagccgcagtgatgtgaagcaacaaatagcgaccattgatatgaatattgagatttataatctccaagtattagggcgtattttagcgaaactcaatcaattacctgatgtcatagaagccaaacgcttttctcattaagacattggtcaccttaacggataaaatgccaagcacaatgtgtcttggcatttttttacgaaattttgttaactcgacataacgatcacttttatatacaaggccagataatgtcagaaaaccgtgaaattttacgtttattagccattatggcgcaattacgtgatcctcaaacaggctgtgagtgggatagggtacaaacctttgacaccatagccccctatacattagaagaaacctatgaagtactagatgccattgcccgcaaagatttttccgcacttaaagaggagttaggggacttactctatcaagtcgttttttatgccagaatggcgcaagagcagcaattatttgattttaatgatgtctgtgaagctatcagcaataaattagaacgtcgtcatccacatatttttgctacagaaaatgaaaataatttagcgactgaaaagcatcgttgggaaaaaatcaaggctcaagagcgtgaagcgaaagcacaatattcattacttgatgatattcctgctactttaccggcactaatgaaagcagagaaaatacaaaagcgctgtgcctccgttggctttgattggcacgagctttctcctgtattagataaagtgtatgaagaaatagatgaagtgatggcagaagtgaaaaaagcccctagagatgatcaacgtattgaggatgagttgggggatttgcttttttctgtggttaatttatcgcgccatttaaaacaaaagccagagcaggcacttaatcgagcttgtcgtaaatttgagcaacggtttaggtttgttgaaaaaatgctcacagagcagggtataaacatagaaaatgcttcattagaagagatggagatcggttggcaaaaagcgaaggaaaaagaaattgagtgaagaatgactcatcattatttgtttttgtgacattaagtgcgaaaaataatagatgaaatctcattgtttttgctcactttttataaaaaattataaaaggcgaaattataaaaggtaattttgctttttttattttaggtggctttaaatatcgttgttgcatttgatttgctaaaaagtgtgattaacctcaaaaaaattaaaagcatgatcataagcaaaagatatgtcacgaaacctgctacactttatatcgtgaaaaaaataaagcatctattctctaaaagtgatatcttagctgaaaggattaagctaaaatgcttgagaaatattttcacgggtttagttgattgaatttttactgttttttcgtgtttaaacggataagtaatgtgatgaaaaagaactttatacaactaagaatgtttgtagcgaaaataaggttcgggtatactgtgttcccgtccagttatatccatcatccaaatacacctaaactttcaggttcagcatgaaaacgaattatatttttgtgaccggcggggtcgtatcctctctgggtaaaggcattgccgcagcctctttagcggctatactagaagcccgtggactcaatgtcaccatgatgaagttagatccgtatattaacgtcgatccaggtacgatgagcccaattcaacacggagaagtcttcgtcactgacgatggagctgaaactgatcttgacttaggccattacgagcgctttattcgcacgaaaatgacgcgtcgtaataactttacgaccggccgtgtatactcagaagtgctacgcaaagagcgtcgtggtgactatcttggtgctactatccaagttattcctcatatcactaatgaaatcaaagaacgcatcatccgtggcggtgaaggtcatgatgtcgtgttagttgaagttggtggtactgtcggtgatatcgaatcacttcctttcttagaagctatccgtcaaatggcggcagaagtagggcgtgagcatactttctatctgcacttaacattagtgccttatttagcggcttcgggtgaagtaaaaaccaaaccaacgcaacactctgtaaaagagttactctcgattggtattcaaccagatgcattaatttgtcgctcagatcgcgttattccagctaatgaacgcgccaaaattgcactgttttgtaatgttcccgagaaagcggttatctcattaaaagatgtcgattccatttataaaatccctgcactcttgaaatcgcaaggattagatgattatatctgtaaacgattcagcttagattgcccagtggcaaatctgtctgaatgggaacaggttatctacgaagaagccaaccctgaaggcgaagttaccattggtatggttggtaaatatgttgaattaccagatgcctataaatcagtgattgaagcattaaaacatggtggtttcaaaagccgtgttgcggtaaatatcaaattaattgattctcaagatgtggaaactcgtggtgtagaaatcctaaaagggttagacgcaatcttagttccaggtggttttggtgaacgtggtgttgagggcaaaattatggctgctcgatatgcacgtgaaaataaaatcccttatttaggcatctgtttaggtatgcaggtggctatgattgaatttgcacgcaatgttgccaatatggaagatgctaactccacagagtttgcacctgattgtaaatacccagttattgcgcttattactgaatggcgtgatgagaatggcaatcttgaagtgcgtacagaaaatagtgacttaggtggaacaatgcgccttggtgcacaaccttgtcatttaagtggcgatagtttagtgcgtactctgtatggtaaaaatactattacagagcgtcatcgtcatcgttatgaagtgaataatctactgttaaaacgtatcgaagatgcgggtttacgtattgcaggtcgttcagttgataacaagctggtggaaattattgaaaatccaaatcatccttggtttgttgcttgtcaattccaccctgagtttacctcaacgccacgtgacggccatccgttatttgctggctttgtgaaagcagcctttgactaccaaaaaggcttgctaaaataggatatgtgagaagagagcgcgtatctctcttctcggaaatttaacttgtacagaggaaaaccgtatgtccaaaatcgttaaagtacttggtcgtgaaattatcgattctcgtggcaacccaacagttgaagctgaagttcacttagaaggtggttttgttggtatggcggcggctccatcaggcgcatcaacaggttctcgtgaagctttagaattacgtgatggcgataagtcacgtttcttaggtaaaggtgttctgaaagcggttgaagctgttaatggaccaatcgctaaagctcttttgggtcaagatgctaaagaccaagctaatatcgataaaatcatgatcgatttagatggtactgaaaacaaatcaaactttggtgcaaacgcaatcctagctgtttctttagcaaacgcaaaagcagctgctgcagcgaaaggtatgcctttgtatgagcatatttctgatctgaacggtactcacggtcaatactcaatgcctttaccaatgatgaatatcatcaatggtggtgagcatgctgataacaacgttgatatccaagagtttatgatccaacctgttggcgcgcctactctgaaagaagcggttcgtatgggttctgaaatcttccatcacttagcaaaagtgctgaaagcaaaaggcatgaacaccgcggtaggtgatgaaggtggttatgcgccaaacttagaatctaatgcggctgcattagcggctatcaaagaagcagtagaagctgcgggttatgttttaggtaaagatgtaactctggctatggactgtgctgcatctgaattctataacaatgagactggtaactacgaactgaaaggcgaaggtaaaactttcacttcacaagaattcactcattacttagaagagctgactaaacagtatctaatcgtttctatcgaagatggcttaaacgaatctgactgggatggtttcgcataccaaactaaagtacttggtgacaaaatccaactggttggtgacgacctgtttgtaactaatactaagatcctaaaagaaggtatcgataaaggtattgctaactctatcctgatcaaattcaaccaaatcggttcactgacagaaacgttagctgctatcaaaatggcgaaagacgcaggttatactgctatcatctctcaccgctctggtgaaacagaagatgcaactatcgctgatttagcagtaggtacagcagcaggtcaaatcaaaacaggttctatgagccgttctgaccgtgttgctaaatataaccagctgatccgtatcgaagaagcattaggtagcaaagcacctttcaatggtctgaaagaagttaaaggccaagcataatcgtaatttcgattagaaagatttattaattttaaatgggtgaatgtattgttcacccattttttttggcgctagatagggaaagtaggatatttacactagaacaatggaataaaaagtgtgatgcgtaagagaaaatagtgttcaatttttactcttttattaataaatcggttaattctcgtggatcagatcccaattataacttttgcacattttcaatggagtgaaatgtttttatatttcacatataacctatttcgttaacaattatggcttagtgaacttaatgttcacgtcagctaatgtggagtattatcatggatgcgtccaatttagccccatcggcgaaatcaagcccgataaacaaacgagggttaattattttagcaatcgacgttgtactactgctgttattgctagaatttttaccctacgatccaaaagctaatgcaggtttagcgttaatggtgtttgtgggtgtgttatggctgacagaagctattcacgtaactattacagcgttgtttattccaatccttgcggtagtgctcgggttaatgaacaccaatgaatcgctaaaatcttttgctaatccgattattttcttattcttcggaggatttgcattagcaacagcgcttcatattcaaggattagatcgcttaatcgctaaccgcttattgatgattgctaaaggcaagctctccattgctgtcttgttactttttggggtaacggcattactctcaatgtggatcagtaacacggcaactgcggcaatgatgttaccgttagtgttaggcattttatctaacttagatattcgttcagaacgtaatactttcgtcttcgtactattaggtgttgcttatagtgccagtatcggtggtttaggtacgttggtgggtagcccgccaaatgcaattgctgctgctcaactaaatttagattttattacttggatgaagtacggtgttccaatcatgttagtgctattgcctatcatgtttattgtgatgtatctgatgctacgtcctaacctaaaacataagtttgatctgaaattagaagtgttagagtggaataacaaacgtgttattaccatgattatcttcttagtaacggtattttgctggatctttagctcctttatcagtagcgctttcggtggtgtgaaagatttagataccgtcattgcagtcagtgccgctattgttattggggtgacgggtgtcgcaagttggagccaaattcaggaaaatacagagtggggcgtattaatgctgtttggtggtggtttaacactgagcgcaattttacaatcttctggtgcaagtttggttatggctgattttatgaaagatacttttggtaacagccattggtttgtcattattcttgccgtaacaacctttattattgttttaactgaattcaccagtaataccgccagcgctgcgttacttgttcctatctttgcaacggtggcacaagctttaggtatgcctgttatggcgttaacgatgattattggtatcggtgcatcatgtgcctttatgttaccagtggcaacgccacccaatgctattgtatttggctccggatatattaaacagacagagatggtacgtgtaggtggggtacttaaccttgtgtgtatcttagttatctctctctttgcttggttcttctggttataattacaattactaattaataaataaaaggtatctataaaaataggtaccttttttattttaattaaattagtttttttattttaattattctaattttttaattttattaaattagaaaaaaaacaaattgtacctatactttaatttcattctttattctaataaaaatagtaggtacaggttatgattacagttttagattatttattagtaagattaaaagagttagaaattaaaactatttttggtgttcccggcgattataatttaccttttattggtgttgttgataatgataaagatattcaatgggtaggcgcatgtaatgaattaaatgcatcatatgcttgtgaaggatacgcacggatcaaaggtttttctgctctgtgtacaacctatggagtgggggagttaagtgcgataaatggtgttgctggcgcatttgcagagcaggttcccattattcatattgttggcgcgccttctcagtcaaagcaagagaaaggaaaaacattacatcattgtttagcgacgggtaggtttgatgcctttgaaaaaatgtatcgtcatatttcaaaaacaacggctgtattaacatatcacaatgcgacggaagaaattgatagagtattagaaacattgtggcgttatcgatatccggtttatttattaataccagaggatgtcggtgtgatgaaagttaataaaccaaagttaccattacaattaacattacctcaaagtaatcccgacgatttaaataaagttattactcttcttgaaaataaaattaagcaatcaaaatcaccatgtattattattggcgaacaagtatcacgttaccaattaagaaaacaagttgagaatttattagaaaaaactaatctgccgttttttactgtatggggaagtaaaggggttgttgatgaagggcgtcaacagtatggtggaatattatttggtgaattatctaatccacaaggtttagattatattataaattctgatttaattattagtcttggggtgagttgggatgaagttaatacagcgggatttaccttcgacgttcccacacaaaattgctatcaattttatgatacttatagcttaatagaggaagagaagatttatggcgtttctttactcgatatgcctaacgccttattagcccttgactatatttatccccacaacatagcgttactaccgcaaaaaatagtaccgcctgattggcaaggactgataaaaatagattctattcctcttctgttagataaagtccttgatgataattcggttattcttgctgaagcaggtaatgcttttttatgtgctgttaatcatatattttctggtaacagtcaattagtggtcagtaatatttgggcatccattggttatactttacccgccgcattaggtgttactcttgcattagaaaaccaaggacgtgcctttgttgttattggtgatggtgcatttcagatgactgcacaagagctttctactttattacgcttaaaactcaatcccgttatttttattgttaataatcaaggttacgcatttgaaaagatcttttacgggcctaaagatacctttaatgatatccaaaactggaattactcacagttacctgagctatttaattgtgatgcttatagcgtgaaagtggatagtctagaagcgttagaaaccgtattacctttattaaaagtgcatcaagatgaactgtgccttgttgaacttgatatggataaacatgactattcggagccaatcagtgaatttattgcgttgcttaatcagtataaatgatgggtattaaaatgttataaagtaaacagccatctaactatccgctcgatagttagatggcgttaactgtttatcaaggcgctaaaaactatttttttaagtaaagcgttaattgcgttcccggttttaacatcttgatatcagcattccagctcattaattgcttaagattaatattgtgacgacgagcaatactgtaataagagtcaccttgacgaactttatagtaacttggtgaagcgccggttggtttgcctgtcggacgattgttcacactacctgcattatgaatttttaatgtttgcccaactaatagggtactctttgcacttaatccattgagtcgttgtagctcttttacgctcatattataacgtcgagcaatggcataaaaagaatcaccggagcggactttataaataccttcttgtttaatcgactgattggctttagcgaccgctaaacggatggtctttaaaatcgcttcgtcagcaaacgcattttggaactgcgcaagtttattacgaggaagcaaaataacatgagggccatttggtgcggtgatcccgcgcttatagcctgggttatagtcttttacggttgtaataggtaattggctaagttcagcgactttgcttaatgttatctgttcgccaatatcaattgcggctaatgatttatcgcgatagttacttttcgggaaagtgatatcggcttcattgtcacggataactttacttaaggcgagaattttaggcacataattcatggtctctttgggtaatgaaagtgaccagtaatcggtaggtagatttttgctttcattagcttttatcgcttgcataacacgaccttcgcccgcattgtaagcggctaatgctaaaggccagtcgctatcaaacataatgtaaaggcgttcaagcaaatctaaggctgcattagtagaagcgacaacatcacggcgaccgtcataccattgattttgtgctagaccataataattagctgtgacagggacaaattgccataagccagccgctttagctgaagaggtgacatgaggattaaacgcactttccaccaccggaaccagtgcaagctccatcggtagatcacgtttttctatttcctcaataatccaatacatataaggctctgcacgtaatgcaacggtttgtatatgttttggattatttaaaaaataagtttcttgctgcgaaatcctttcattgtcagggatatccatttttaattcacttactacataaccccacaaattggtttttatatcatattgtggttggtaagaagttgaagtccctaaagatgtgggtgttatcgcagacaaatcgggttttatgctcttagattgctggcaacccgccaatagcaatatagagaacaaaatcacttttgtcttcatgttcgaaaattagtcctgtgtgttttttgccctaaataatactagtgttcccaaataaaacaaccgataggaactaaaagttgtcttttaattctcttaattttgtaaatgtctttattggagcataagtattagaagttatacctaaaattctttgtaaatcaatatcgtcagattttagaaaaagattaatattcttttcatttttcagtgttatcggcactgttggttgcaaatgatggcgcatttcagtaactttgtttaaataatcggtaatatcaggattttttggcataatatggtgcgcaaaggtcaagttagctaatgtatactcatgggcacaacaaattaaggtgttatcaggtaatgccattaacttttgtaatgagctaaacatttgttgtgcactaccttcaaataaacgtccgcaaccgccggaaaatagcgtgtcaccgcaaaataaataaggttcgctatagtaggcgacatgacctaatgtatggcctggtgttccgatgactaaaaaagaaaaagaatcaacgataatgtgttcttgatcatgaataattttattagcgcctttagtttgtgtttcttgtggaccaaaaacctcaatgttaggatatttactaaccaacccagcaacaccaccaacatgatcttcgtggtgatgagttaacaaaatagcgacaggtgttaatgaacgttgtgagatgatgtctataaccggtttggcttgggaaggatcgacaatcacacattcactattttcattacttaatagccaaatgtagttatcggataaagcgggaattctgataagctccataaagttaccttacttataaatataaaagggttaaacgatgaaagcagcgcgttcgggaaaaccaatttgtatgccaagctcttggcgtaatattccttggggagaatattaccgcatggcaattgaattgcgattacaaaattggtggccgaaaatatacggttttcatatgcttaaattaggtcaacttagtgctgaactcgatactaaatccagtatggtctcacatcaagttaacgtgactacaacgacgacaaacacagatgttatggcgtctctcaattatctgccatttgaaaataaatcggttgatgtctgtcttatggctcatgttttagattacagtgcagaccctcattggttattaagagaagccgatcgtgtattagtggatgacggttggatcatcctatcaagttttaatcctatcagcctattaggtataggaaaatgtacgcctattttacggcataaacagccctattattgtcggatgttttcacttcgtcgccaagttgattggctaagtgtgcttaattatgaagtgataacacaacagaacttccagattatgccattttcccgtcccgtaaaacgtgatggtaagcgctatcatgtcgggggatgtttaaatttaatattagcacgtaaaagaacgcttcctttaacacccaccgcgatgaagtttgcattaccgcgtatgagtgtaaaaggcagagttttaggcgctacacgtaatcgacctgattaatatcactatctgccgttattactctcaggttttatcttgttgactttctagatagccagtatcttcttttgtgggagattgcgcggccgctttggccagttcatcacaacgttcattttcgtcatggcctgcatgacctttaacccaatgccattcaatttcatgacgctcaatggctttatcaagacgcttccataaatcaacattcagcacagggcttttatctgctttacgccattggcgttttttccaactatgtatccacttggtaattccctgtctgacatactggctatccgtagtcagtgtaattttacaagggaattttaacgcttctaatgctacgatagcagcaaggagttccatgcggttattggtggtcataaaaaaaccttcactaagggttttttcatgctgttggtagcgtaaaattgcaccataaccaccaggacctgggttgcctaaacatgaaccatcggtgaatatttctacctgcttgtgcataaaggcgacttatcctttttaagtaatacgaaaaattaaccctaagtctgacataaaaacggattatgagcactccaatcacacgacaaattgtactagataccgaaacaaccggtatgaacaaactgggcgttcactatgaaggccataatatcattgaaattggtgccgttgaggttatcaatcgtcgcttaactgggcgaaatttccatgtttatataaaaccagaaagattggttgatcctgaagcttttgaagttcacgggatcagtgacgaatttttagaagattgtccttcatttgcagaaatagcggatgagtttttagcgtatattcgtggtgcagaattaattatccataacgcctcgtttgatatcggctttatggattatgagtttcagaagcttaaccgtgatattcctctcacagaaactttttgccaaataaccgatagccttgctatggcaagggagttatttcctggcaaacgcaataatctagatgcgttatgtgacagatatttaattgataactccaaacgaacactgcacggcgcattattagatgccgagatcctcgctgatgtttacttagctatgaccggtgggcaaaccgcattagctttttcaatggaaggtgaatcgaacgaagagcaaaaaggggatgatatacaacgtattgtacgaccagtgcgtggattaagagtaataaaagcctctgcagaagagttagttgcgcacgaagctcggttagatttagtggtgaaaaaaggaggccactgtttatggcgtccagctcctgcttcgaatgatgaaactgcataaaggtaaagtgatataaatagagtgttgagattaaaaactatccaaacgcatctttttgttagaaaaatagttgacgacaaggtaagagattcgtaatattcatctcgtccgaaaggatacgcggagcggtagttcagttggttagaatacctgcctgtcacgcagggggtcgcgggttcgagtcccgtccgttccgccagaatttatcgttttgatgtattaactgacatcaaaataattagaaaccgtatcgctttatgctgatgcggttttttttgcctaaaataaaaatagtatcattaactcattaactcattaactcatttagtcagtattctgtcgacactcacgtcttctattacagatatctaagtttattacttttgtctctgttttctacctccatttataacgccactattatttgctattaaataagagcaattcatattaattggtagctttattttacctattatattttgttatcgataatggtaactattatcgttatagttttaattcgcattatcttgctataatctctcttatacctagcgtggggtaactaacaggctaacattcaatgagcgaaaatagagcgtctaaacaacactcaagtaaaacaacaaaagcaagggtagtgaaggaatatcagcgacagatacttcgtcgtttcttttacttaatgatattagggggcgtgttatgtagcgttttgatccttgattttactttagggccttcaggattatcgctgactgaactgtggaatacactaatatcgccagaaactgccgatgctggcactcgggttattgtgtgggatatcaggctaccttactcccttatggcggttgtcgttggaatgtcactcgggttagcgggtgctgaaatgcaaactatactcaataacccgctggcaagtccctttacgcttggcgtctcttctgccgctgcttttggtgctgctttagcgattgttttagggattggtattccgggggttcctgctcagtggtttatttcagttaatgcgtttattttcgcattactggcaacgttgttactggactttatctcacgttggatgcgagtttctacctctggaattattctctttggcatagcgttagtgtttacttttaatgctgctgtttccattatgcaatttatcgctaacgaagatacgcttcagggattagtgttctggacaatgggtagccttaatcgggcatcgtgggataagttatacattttattggttgtattagtgattatcttccccttgtcattgatgaatgcttggaaactgacggcacttcgtctaggggaagatcgtgcgatgagctttgggatcaacgtcagacgcttacgcctaacaacattacttcgtattagcatcatttctgccttggcggtagcatttgttggcccaataggttttattggattagtcgctcctcatattgctcggatgacttttggcgaagatcatcgtttttatttgcccgcaagtgcccttattggtgcattggtattatcgatagcttctttagtctccaaaaaccttttatctggtgtgattattccggtgggaattgtgacttctcttgtgggtatccctttctttgttagtatcattttgcgtcatcgcgggagaatataatgaacacgggattgaatgctgggttgcgtattgaaaagttttctacgggatatgcgaagcgagaaatcattaaagaattaacggtctcactgcttccacgagggaaaattactgttcttttggggcctaatggcagtggtaaatcgacgttgttaagggcgcttgctgggcttaatagcgcacaaggaaagctttttcttggtgatgatgagttactctccctctctttttctaaacgagcagagcaggtggtttatttgccacaaactttacctgcgggtgttcatttgagtgtcttggagtcaattctggttgcaagacgagctttaggtgaacatcgttctcattcagcgaatgatgaagttatagatctattagaacaactgggaatttcacatttagctatgcgatatcttgatgagttatccggtggacagaaacaattggtggggcttgctcaatcactaattcgacgaccaagtttattattgctagatgaaccacttagcgcactcgatcttaattatcagtttcatgtgatggaattaatcgcgagagaaaccaagaaacgtaatatgattactgtggttgttgttcacgatattaatattgcattacgccatggagagtatgtattaatgcttaaaaatggggagttagttgccaatggtttaccaactgaggtgatcacaccagaaatactcgccgatgtttatcgcgttagcgcccgtattgaacgatgctctagaggccatccacaggtattaattgatgggaggataaatgatatatagcatttttaaaccactcaaataattgtatttgatatgatgactatacttatttgggtggtctttgatagattcaatttggtttatatttaccattgataatacgcgtggcttgttttattaaaggtaaatcaatcatctccccattaatctgaaaagcataactggctgttgattgcttaaccacttcttgcgcccatttaattttttcctcagtaggtttaaatgccttattaacagtatctatttgatccggatgaatacagagtttagcgccaaatccaagagcgctagcatggttggcgtccattaataatgtattaggtgtgcaaaattcaggggtgacacagtcaataggggagataaggttggcaatgcgtgaagcgataacgattcggcttcttgcgtatagcaacgcttctgctgtttgttggcaatcaatatctagtgagtaatctaatgagccgaatgctaatctcgttacaccactattggcaatctcttcacaatggtgcactccacgcgctgtttctataatgcctataaatggtcgctttgatatagccagatgaagttttgattttatataggaaagtatttccgcatcttccagttttgggatcattactcctgtcattagcgtttcatttaatgaatttaatagatcaacatcgtttttaaattctttctctttaggatgatttattctgatatatatactggtgttaatgatggtgttatttattgtcgttagccaattttgaatgttgtcacgtccgagcggtttttcatcaggatgaaccgcatcttcaagatcaagaatgatcgcatttgcaccataagttaacgctttggaaatcataacttttttattagcagggacaaacagatagctaatctcttcgttcatatttacctaccttagtaataaatataatgtatcttccataaaaacgaataattatgagaatgagattgattattatttacatcatcattttctgatggtagcttactcatcaacctttttcaagacgctcgaaaaagtaaaaaaaggttaagtaaccccccaagatagataaatttaaattaattgtttaagccttatttctttgggagaaaaatgatggagacggtagagaaaaagagtattgcagggcaacaaactgctatacaaacagatttttcaacacgtaatgcccttgctcgtatcattcgctgtctttttgcagaaaaattattggatgataataaactgcaagttttcaatgatgaaaataacgttaagtacccgctttctgatgggatacatatccttcaatttaatcaaacgaccgtttttcctgcaaataccgttattaatcgcggtgatattatccttaaatcaatggatggccgccaccgaatggtgcaatcccatgaagaacttatggggatactgaaaaatgaacttagtttcacccctacaacggagggaatgacaaaattcaataaagatgtagcaaacagtatccataatgatcgattagctagagcacatcggtcaaagtggcgggatacgatttctaatgagatggcacaagagggaacatcttgttttattgaatggataactcgtcattacagtcggcgtgatggtgcaacttttctcgatcagtggggtgcgcttgaaggtcattcttattacccaacttggaagtctagacccggtttaagcgatgatgatattgtcgcactatcagctgaatttggtgcacgagttaatctgcgtatcgcagccatacaaagcgatatggtttattgtgagaagatgccccatattcaggatatccatcaatggttttcatcggcttttccaaccgtttggaataaatggtgtgagtggcttacaagtcaatatcaaaacccacaaaaatggttacctattcctctgcatccttggcatcttgaacactggatcattgcgcatttctcaaaagaaatagatgaaggcattcttctaccattaggccctcaacttgagaccgcggcatccatgtcgtttagaaccatgcttcctaccgcatctagatcaccctttatcaaattacctgttgctatctggatgactagcgaaatgcgcagccttcaagccaaatctattcatatggggccacgtattagtacgattattgaggatattttgcgggtggataaggattttgatggcaagctggactttttccgagaagaagtggcgtggcattttcgtcataacgtacgtatggatgacgctgaaggtaagtttctctcggttgtatttcgtgatacgcaagcatgggaaagaaacgataatttaatcgctatcacagttgcatcattatttactgagctcccacataaaccccaaccccttattagcgagctgatcgcattatcaggcgacttacctgaaacatggtttcgtaattataccaaagtcatactgaaacccgttttagcgatgtatttaatttatggcattgcccttgaggcacaccaacaaaatacgcaagttttatttgatgattccggtcgtgcggtcaccatgcttattcgtgattttggtgatggacgcagttgggctccagcactgcgtcagcaaggatatgagcttcaaccttatatctggcccggcattttacccacggtgtttgaagatgatattgaacctgtcagaaccttcgttgtagatgcttgtcttgtcagccatttacatgaaattgcgctttgtttaactcaactttatgacatccctgatacccgcatatggactgtgatcggcgaagagcttgaacttgtgtttaaagcacttcaacccagagtagaggcggatttttggcacaaagagcgtgaacattttctccaccacccttggtatacccgctcattaatgagcatgcatttacagcaatatactgattaccgtcttcagcatggacttaacaatccgttagctggtgaacaagtagataactctaagatctgagagaataataatgatcacaaacaaacattttttagcattgactattgcagcaagtttaattcctgatttcgtcagcgcggaagagagaattattgttaacgcagagcgcgttaacccccaaactaaaggtaggttatcacaacaagccaacataggtttattgggaaataaagatatccaagatattccatttagtattaagggatatacctcgaaatatattgagcaacgacaggctaaaacacttggcgatgtaataaaagatgatccatccgttcaagtgacatctccgtcaggtggtattcttgattcctttatgatccgaggattccctatcggggaaggcaatattggtgaagttgccctcaatggtgtttatggtgtagcgccaaattatcagttattacctcaatatttagagcgaatagaattactaaaagggcctggggcggggctttatggtatctcccccaatggcggggttggcggtgttgttaacgcggtgacgaaaagacctactcgtcagggaactaaacagattactaccacttggggatctgataatcaacttggtgcctatatagatgtaggtaaattgtgggtaaccccagacggtgaaatgtggggcgtccgatttaatggtggtggtagtggtggagatctggcgcttgataatactcataaaaaaacggcattaggtgcactcgctcttgactatggaaaagatggattcaccgtttcagttgatttattcgatcaatatcaatatgtcaaatcacctaatcgtccttttattgtcttagcgggtatcgatgttcctaaggcccctaatggtcgacgcaatattgcccaaaaagggatgtggtggaacacccgcgatcagggcgtattactgcacagttcatacgagcttaacgataatctaacactcttcatgaatgccggtggtggtcgttcaatcgtttcacgtatctctgagcaaaccccaaagattattaacgacaatggagatgttgaatcggcaatcactaattatcgctttaatgtacatcgttatatttttgaaaccggtgtcagaagttatttttcaacgggcgctattgatcatcagatgacattacaggccagctattatcatgaccgtcttgctgttgcgggtaatgtaggaaaacaaaaggtgatttctaatatttattcaccatcagaagtcgatgttaccctaccatcgtctccagcaagcgttcccaaagtatcttctagtcaattaactagctttgccgtttcggacatcatgaccatattgaatggcagtgtggatattatccccgggatacgtttgcaaagagtgcaagccgataactttatggctaatggacagcgttcggccagttatgatgaatcagcggtgacgccaatgttggggctggtttaccatcctttagagtctgtttcgctctatgccaactatattgaagggttaagcaaaggcgatatagccccgagttttgcaaaaaatgccggccaagtgatgcgtccttatcgctcgcgacagtacgaagttggggttaagtatgataatgcgggaatacaaagcagtttggctcttttccagataaccaagcctagtggtgctatcgacagcactgataatatatttaatgctaatagtgagcagcgaaatcgtggcgttgaagttaatctttcagcgcaggtgctggataatttacaaatctcaggcaatctttctcttattgatgccgaacttatcaaatcgcctaaatctgatatccgtggtaacaaacccgttggcgtttctcctctacaagcaaatgtgggagtggaatatgaccttcctattttgcatggattgtcattaaacagttatgtcaattatagcgcaaagcaatatgtcaatcaggcaaatacacagtctatcaattcttggacaacggtagatatgggagcctcctataaaacacgtgtgtatggtgcgcctaccactttccgttttgatgtacagaatctatttaatcaccattactggtctggtgtcgcgtcatataccactattgcacagggagcaccacgtactttccttgcctcggtaagtgttgacttctaagagggttccatatgtcttcgttgttaaatacttattaccgagcaaatgaatcttggcagatcgctataacccaagcattacccccttatatcgatccggttattatccgttggttggagacatcccctgatacccttgttcatttaacacagatatatggttcaccccttaatattgtctggcctcatactgtggagcagaacgttaatgccatggtcgaagtcgccaaaacatttggtatacaaaccaatttgtattatggggttaaagtcaataaatcacagtcattattacaagccgctgttgctgcgggaactggggcggatgtatctagcctatatgaactcaacgatgctattcgtgcgggatgtaaaggtacagagttgtgtgctacaggccctgccaaaacaacggcatttttacaggcgttaatagtgcaaggggcacggattgttattgattctattgaggaaatggacgagcttattcaccttgctacaaggtggataagtccatcaggacgtataagtatactgctgcgttttcgtcctgagtctaatcatatcagtcgttttggtatgttatccgctgagatcatgacagcgcttgagaaacttaattatagtgaccaagtaaaggttgatggattccatttccatcttagtggttactcttcggtatctaggatcaaagctttttttgataccttacccttgattagctacgcacgtgctttgggttactccccttatattatcgatattgggggagggttacctgttcagtatgtagacagtcattgttataagaaatggctctctacgcaaacacataaagactatcgtactcgacgaattcctgattctttctatccatatggtggagagataaatgcccaaggctggctcactgagtttctaaccggagtcgatcccacaggtaaaagagtttgtgatgcattaattgaggaaggattaacactttgccttgaacccggaaggagcttggttaatcaaagtgcgatcagtgtatttcgtgtctgtcgagttcgtccatatgatcatgtcggacatgttatttttgtcgaaggaactagttttagcgcatgtgaaacgtggtttaattctgaattcttaagtgatcctctccatatttatcgaaataaccatcagccactttcttctgctggaaatgcttggattgcaggccatagctgtttggacgacgatgttatcaccaatcgtttgatcgcttttgcacacctaccaaagccaggtgatttactgatatttgctaataccgcaggttaccaaatggatttactggaaaatcaatttcatcggcatccgttgcccacaagattaactgcggtcataaactcacatcaaaaacctatatttaccattgataattaaggacttttaatatggtttttagcaaagtaactgatttaattggtaatactcctatcattcaattaccgctgctgcaatcggatacgcgtctttatatcaaagtggagaaaaataatcccggaggcagtatgaaagatcgcatggcgagaaatatggttgttgcggcactgaaatctggaaagatcaagcctggtagtacaattgtggagtcgtcatcaggaaatactggcattgggttggcaatcgctgctatcgaatttgggcttcgatttatcgcggtggtcgatcaccatgctgcccaagataaaattgctatcatgcgcgctttgggtgctgagatccgctacgttaaaggcgactatggtgaaaatgaagttgctgttgtggaacgccaacgtatggcggctgaaatcgccaatgaaattcccggcgctatctttatgaatcaatcagataatgcagccaatgcgggaggatatgcagatctggtacgtgaacttattagtcagataggcaaaattgatgcgtgggttggatgtgtaggtacgggtggctctatgacagggatagcccatggattaagagttcataatccagaacttgtaaccattgccgtagagccggaaggctccatcatattcggaaaacccggtaaaccatactatcaatcaggtacaggcaccccacaaggcgatacagtggggttagtgttggattacagttgtattgattatggcgaacaagtctctgatgtatgtgcttttgaaacggctcgttaccttgctcgtcgttttggtttactggttggtggctctacagggggagtggtatataaagcgctggagttgattaacaatagtacaatttgcggaaatgttgcacttgctatggctgatggtggtgaaaaatatctgcagacgatttttaatgacacatggcttaaagagcgaaatttaatatcggagtcagtctgggaacaacttgataattggttttctttgccaacttgtttgggggatagcagatgatcccaaatgagaaattgagagtaacactatgtggagccggtcgtacagggcatcttgcggcaattttatttagcttaaatcctgcgattgacgtcactctttacagcagtcgctcagaagctgtgacagcatataaagaaaatgatcatcaacttcaggcggtgatgcctgatggtcaagttattaaaacccgctcggttaggatgacagaagccattgatgaggcgtgctctgaggcagatatcatcattattacgacaccaagtcatgtacgtgaaagtttacttcaacgtatggcgccaatactgccgaaacataaaaacatctttgtgggcgccattcccggttttgctggctttgactggctggctgaaaaaacgttaggtgatgcatccaatattgttatatggggaatgaaagatgttccccatattgcatttgatctgcaaccgggaaaaagtgtcagaatggggggcggaaaatcacaactctatgtagctgtgcatagaagagaaaaaccgcaatatgccaatcttcttctcaattacctcaaacaactttatgactcacctattacgctactgaccgattatctagaaattaccctaacgccaggaaatcctattatgcacagctctgttatctatggccttatcggtccatggggacagtggcacaataggccttttgagagcattccatgttggtggaacgattgccctgagttgggtgcctattttcttgcccgctgtgatagggagaatcaagcgttatgtaataaagcagaagttgtattggggattaatctcagttccgtgcaaccattacagcaggaaatagtagccgcatatgcggactcaattgctgatccgcgaacattactcagtgtgttacgaacgaataaggcctatcagggtattcctttacctcttatttctacagcacaatcccatggttatatttttgacaaacaacatcgagtttttcaggaagacattgcctatggactagcgcttcttgttgctcttggggaacgtcttcgagtaccaacaccctatataagagaaatatatgattggtgttgtggttatatgggaggaaatctgcctcaccctcagatcccaatggattggccaataataagggtgaaatagtatgcgtgttaccggcagtgtcatttttattgtccagtttttatttatcgtacagttactctcaatgggagccatggaaatgagtggccctttttggccgcttcatctcgaaagtatggcgtcgacagagctactgagtatcgtgggaaccggcgtgtatatcgcacctatgttgggcgttatgctaaccagtaccttttggggacgaataggcgataaaactggcaataaagtgatgatgatccgtgcactgatggggcttgcattaacgcaattggggctcgcttttgccaatgatgtctgggtaatactgctactacgctttttacagggaacttgtgcggggtatattgcacctgctcaagcttatggtattgccatgatccccatagcacaacgtactcggcttttggcatggttacaagtatctaccaatgcaggatcgttagctggagccattgctggtggggccatcctcgatttactgagtttcttttggataaacttcggggcatttatcatttgtacgttatgtgcactactggtttttttcatattaccgaatgatttaccgcgccacgcttcatccaattgcgtcacttcctcaacaaataaagcaaaagcgatatcatcaattaaccacagcgtcattgttggcttacttaccgtactgggtttgttattaatgagccgcatgatcacacaaacccctttttctctttatgtcagtagcgtatttaatgcctctaactggttaacaggggtcgcttacggattgcaggctacaggtgtgattgtctcagcctccctctgggcaagatggtttgaagcacacaacatatctcacgcactctatcgaatggtggggatcattgcgggatgttttattgtgaccttactgctagcagcagtaagagaaataagctggtttatcggactttattttttgtggggcattcttcttggggcaacaacgccagtattaaccgcattaatatctcgctcaaccgctgaaagtaaacagggttatattttgggactggtgcaaagtattagccagtttgcctctatggttggcattgcactgggggggggaatacttgtttggcctgggttgaccacgttgtttttgtgtgtggcggtgatgtattgcattactttaattattacgctgaaaatgagttactcttcaaaaaacactaaccaaaaataggttattaatcatgatattacgatttatattttctattgtattgttgtattcatcaatggcttactcacagcaagttgtaacacctgttactgacctacttggcagaactgtgaatgtcaaattaccggtacagcgcgtcattttgggggaaggacgacagctttatttagtggctatgtttgataaagaaaatccagcacaaaggatagtcgcttggcgaaaagatttaatacagtccgatccggccacatggcaacagtaccgacaacaatttccacagttggcaaaaatccctacctttggtggcagcgaacaaggaacgtttgatatagagcaggcgattaatctgcaacctgatgtcatcatcatgaatatggacgcacgcaatactattgttgatgctggacacgaagctgcactagcccgtgcgggtattcccattgtttatgtcgactttcgctatgatcctattgcacacattcctccaacagtgacgttatttggtaaattatttggccaaccagatcgcgcagaagcttatttaacattccgtgataaagagttacaacgagtgacatctcgagttgaacaattacagggggcattgccaaaagtatttttagagcgtcttgggggttattcagaagagtgctgtatgacctttggtaaagggagttttggccgttttgttaaaatagcggggggggataatattgccgacaatcttgctccgggaaccttttttacgctaaatccagaaaaagtggttgttgcaaatcccgatattgtgattattaccagcggcaattttcaggcatttgtgccgggtggaaagtggatcccacttgggccggggattaatattcaacaatctaaacatcgactcgcatggtttacgactcgccctgcttatgttgatagtaacgctcgccgtcgtggcgcattttttgctatttggcatcagttttataatagtccctatgatgttattgctatccagcagctagctaagtggatacatccccaattatttgctgatcttgatcctgatgacacattccgtcgtttacatcaagaatttctacccatctcatatcagccgggatatatgattgatttggaaaaagaggggaggtaaatatggagtatgatgtcgtgttatatcccattgccttgctccgtccttcagaagaagtcaacatggctcatgttgaagctttaactaaggaaatagtccgttgccaaagatggacaacacctatacccattgaaaaagagaccggaattattatggacggtaatcataggtatcaagtcgctcatcatcttgctctcacttatattccttgtgtgttgcttgattacactgatacacgcataactgtgtatgattggcagaatggacgagcgtttagcccattaagaataagggagcagatattaaagcaaggtaatattttcccttataaaactactcgacatctattttctccaagccttccggccgttaattttccgcttgaacaattagttgaaaaaatagccagtaatcatctgaatgttttcaagttaggtgttggtaggtgaccattaacagcgggaaaattaaatagcttagtatttatttgatttgatagataaaacagcaacgtaattttagcttgattagtcgtatcaagctaaggtttaataagatacttcttaattgcgcaaataaaagtcatttttcatttttgttgcgcaacaatgtggtggtgtaatgttatttcccgcgtttatcgtaataaatgctgtttaaatcaaagaattattgattttcactgattacgatagccacctttgtggattttttatattgcggttttttgcccgcattgagagaatcagctatctagatgctttttatccgacttggagtagaaaatgaccactcgtaaaacccttgcaaatgcgatccgttttttaagcatggatgcagtgcaaaaagccaaatcagggcaccctggtgcacctatgggcatggctgatattgcagaagtattatggcgtgattttttaaatcataatccaactaatcctcactgggcagatcgtgaccgttttgttttatctaacggccatgcttcaatgctgatttatagcttattacatctgtctggttatcaagtttctttagatgatctaaaaaatttccgtcagctgcattctaaaacaccgggtcacccagaatatggttataccccaggtgttgaaactaccacgggtcctttaggtcaagggattgctaacgcagtaggttttgcgatcgcagaacgcacattagcggctcaatttaaccgtcctggtcacgatatcgtagatcactacacctacgcctttatgggggatggttgtatgatggaaggtatctctcacgaagtatgctctttagcaggtactttacagttaggtaaactgattgcattttacgatgacaatggcatttctattgatggtaaagtacatggttggtttactgataatactgctgaacgtttcgaagcgtatggctggcatgttattagtggtattgatggtcatgatgcagcgagtattaaagctgcgattgaaaccgcacaacaaattactgataagccttcactgttaatttgcaaaaccactattggttttggttctcctcataaagcaggtactgccgattctcacggttcaccattaggtgatgcagaaattgcagaaactcgtaaagctctgggctgggagtatggtccttttgaaattccacaagagatctacaaagagtgggatgctaaagaagctggtaaagcaaaagaagctgcgtgggacgctaaatttgctgagtatgcagcacaattccctgaattagcagctgaatttaaacgtcgtatgtctggcgaattacctgcaaattgggaaaaagagtcaacagcctttattgaacagttgcaacataacccagcgagtattgctagccgtaaagcatcacaaaatacattagaagcgtttggtaaagttttacctgagtttatgggtggctctgctgaccttgcaccaagtaacttaactatgtggtctggctctaaagcattaaatgaagataaagccggtaactacatccattatggtgttcgcgaattcggtatgtctgccattatgaatggtattgcattacacggtggttttgttccttacggcgctaccttcctgatgtttatggaatatgcacgtaatgcggtacgtatggctgcactgatgaaaatccgcagtatctttgtttatacccatgactctatcggtttaggtgaagatggtcctactcaccaacctgttgagcaaatggcaagtctgcgtgtaacaccaaatatgagtacatggcgcccatgtgaccaagttgagtcagcagtagcatggaaatacgctgttgagcgtaaagatggtccaactgcgctcatcttctctcgtcaaaaccttgctcaacagccacgtactccagagcaactggctaatatcgagaagggtggttatatcctgaaagattgtgacggtacacctgaacttatctttattgctacgggttctgaagttgaattagctgttaatgcttacgatcaattaacagcagaaggccgtaaagtccgtgtggtttcaatgccagcaacagatgcatttgataaacaagatgctgattatcgtgaagcagtattacctgcagcggttaaagctcgtgttgctattgaagcgggtatcgcggattactggtttaaatatgttggtcttgatggtgtgattgtcggtatgcatagcttcggtgaatctgctcctgcaaacgaactgtttgctgagtttggttttactgttgaaaatgtggttacacaggcaaaaactctacttaaataatcaataaatgttaacaagagcacatttttgggaataatttctcagatgtgctctttttttatgcttccccctttttttgctattgcgattttctctcatttctcgtaatctgaataccaataagctgaaccgtttcagttatgctaaaaatgtcggtgaccgcacattttttagttttacttgatttatcgttgttgattagtcaattgctcgattattctaggcggttgcataattacgagttatcaaggaagttacatgacaattagagttgctattaacggttttggtcgaatagggcgtaatgtgttaagagcgctttatgaatctggaaagcgggctgaaataagcgttgttgcaataaatgaattggctgatgcgacaggtattgctcatttgcttaaatatgactcaagccatggtcgttttgcttgggatattcgtgttaataatgacttattgcaagtaggtgatgatgcaatccgtcttttccatcatgccgatattgcagacttaccttggggtgagttaggtattgatgtggtacttgattgtagtggcgtttatggatctcgtgccgatggtgaggcgcatattgctcaaggggcaaagaaagtgctcttttctcatccgggaacgatagatcttgatgctacggtggtattcggtgttaatcaacatgaactgaaaaaacagcaccgcatcgtctctaatgcctcttgtaccacaaattgtattatcccgattattaaaatgatggatgatgcttttggtatagagtcaggtacagtgacgacaatccatgctgcgatgaatgatcaacctgttattgatgcatatcataaagatttacgtcgtacacgagccgcaggacaatcgattattccggttgataccaaattagctgccggtattacacggattttcccgaaatttaaagatcatttcgaggcaatttctgtacgagttcctacaattaatgtgacagcaattgatttaagtgtcacggtaaaaaatgctgtaaatgtgttagatgtcaataagttaattcaaaaatcagcaactggcgcatttcgtggtatagtggattacacagaattgccattagtctcaacagattttaaccacgaccctcatagtgccattgttgatggtacacaaactagagtcagtgggcagcatctgattaaaacgttagtctggtgtgataatgaatggggctttgctaaccgaatgcttgatacgacgttagctatggctgcaactggttttaaataatcatgtattaatgacggtactcagcaatagcacattatgtgataatgcgcggtactgaacagaagattactaaattttagagaatcaatgagaggattcatcatgtctgtaattaagatgaccgatttagacctggccggtaaacgagtactaattcgtgctgacctgaacgttccagtgaaagatggaaaagtaacttcagatgcacgtattcgtgcttcattaccgactattgaagcggctttaaaacaaggcgctaaagttatggtaacttcacacttaggccgtcctactgaaggtgagtacaacgaagagttctctttaaaaccagttgttgactatctgaaagagaaattatctgcacccgttagcctagcaaaagactatttaaacggtgttgatgttaatgcaggtgaattagttgtacttgaaaacgtccgttttaataaaggcgaaaagaaagacgacgaaacgctgtctaaacaatatgctgcattatgtgatgtctttgtcatggatgcattcggtacggctcaccgtgctcaagcgtcaacacacggtgttgctaagtttgcggatatcgcttgcgcgggtcctctgttatcagcagagcttgaagcattaggcaaagcattagataaaccagagcgtccaatggtggctatcgttggtggctctaaagtatctactaaattaacagttttagattcattatcaaaaattgctgaccaattaatcgttggtggtggtattgctaacacctttatcgcagcagaaggtcattctgtaggtcgttcattatatgaagcagaccttgttgacgatgcgaaaaaattaatggaaaaatgcgatattccagtaccaacagatgtccgtgtcgcgacagaattctcagaaacagcgccagctgtactgaaatcagcaaatgacatcaaagatgatgaacaagtattagatatcggtgatgtgacggctgaacgtttagctgaaatcctgaaaaacgccaaaaccattctgtggaatggccctgtgggtgtctttgaattccctaacttccgtaaaggtactgaagtgattgctaaagcgattgctgatagtgatgctttctctatcgctggcggtggtgatacattagcggctatcgatttatttgatatcgcagataaaatctcttacatttcaaccggtggtggtgctttcttagaattcgtagaaggtaaaaaacttcctgcggttgctatgctggaagaacgcgctaaacagtaattaagtcacgctcatacaggtagagtgtaaaactctgcctgttccaaatataggatcttattacatgtctaaagtttttgatttcgtaaaaccgggtgtcatcactggtgatgatgtacaaaaagtatttgcagtagcaaaagaaaataattttgctctgcctgcagttaactgcgtaggtacagactcaattaatgctgtattagaagcagctgcgaaagtgcgttctcctgttattgttcaattctctaatggtggtgctgcatttatcgcaggtaaaggtcttaaagctgaagcgccacaacaagcggctatcctaggggctatttctggtgctcaccatgtacaccaaatggcagaatactatggtgttcctgttattttacacactgaccactgtgcgaaaaaactgttaccttggattgatggtctgttagatgcaggtgaaaaacactatgcgaaaacaggtaaaccactattctcttctcatatgattgacttatcagaagagtcattagaagaaaatattgaaatctgttctaaatatttagcgcgtatggctaaaatcgatatgactttagaaatcgaattaggctgtactggtggtgaagaagatggcgttgataacacaggtatggatagctctgcgctatatacccaacctgaagacgttgcttacgcttatgaaaaactaaatgctatcagcccacgtttcactatcgctgcatcatttggtaatgttcacggcgtttataaaccaggtaacgttcaattaacaccaaaaattcttcgtaactcacaagactatgtgtcagagaaatacaatctgccacacaatagcttaaactttgttttccacggtggttctggttcatctgcagaagaaatcaaagaagctgtaagctacggtgttgtgaaaatgaatatcgatactgatactcaatgggcaacttgggacggtatcttacagttctacaaaaagaacgaaggctatttacaaagccaattaggtaatccagaaggcgctgataaacctaacaagaaatactatgatccacgtaactggttacgtcatggtcaaacatcaatggttgttcgtttagagcaagcatttaaagagctaaatgcgattgatgttctgtaatacaattttattgtaatacacctaaaaaacccgcttagtatgcgggtttttttgttggttgttagcactagatacgatggtattgggctatttagtttcggttatatttgtcattaaaggtttggtctgaaatacacagataataaattccttcaataaaaccgataatagcgggtatccccgtccagcaaaaaatgagatataaaatccccattcctactttacgaagatagaatttatgtattcctagcccaccaagaaaaatagctaataatgcggctgctagcttatttttatcattcattaatatctgctcctattaccaatcattggtttttaatcatgaatattgattattagacaatgctaaatattgtcagtttcaattaaaggtactatttataagatagattaaaaccagaaaaaagaaaaaaagagaagatcactaatcataaataataaaagattaaggttgtagaagatttaatcgctaagcatttttataagagataaaaaagcgcctttctaggcgctttgtctgtgataagcgaaggtgtttgcttatttacttaatcattttactctcttctttcatcatgcggtttagtaaaggtactgttgcccacataatcaaaccaaccactaaggtaacgataccgattttgccaaacacatcagtataaataggcagtgtttgtagtggatcggtaataccttcaggtggcgcggtaaaggttgctacatggcctcctaacaggtaagccgtcgcttgtgttaagaaccacatacctaaaataaagcccatcatatattgcggtacgaaagcggcaatcatcgctaagcctaatgcactgatcatcaattcccctagactttggaagagataaatcagtacaacaaaccaaggtgatgttaagccttgagcatcagcaaaccacatacctgaagcggcagcggttaggaagcctaatgagcataaaagcatacctgtggtaaattttgccggcatggataaatctttgcctttcgcgccaaaatggctataagccattgctaagatagggctggcaataatgatccaaaatggatttaatgcttggaaactcaccgggttaatatcaaagcctaacagggtatggtgaacattatggatagcaaaaaagttaagtgaggttggcatctgagcgtagagaatatagaaaataacagcttctaacatcagaacaaatgcaacatacattttattacgtgccactctgtctttttgtttaaaggcttcacgaaaataaatgataaccacaacaatagacaagctgattaaaacgatgttagcaatcatcacattgtgcaacaaccatgcacaaataaagaccatagcgacagagcctgcaataactaatagcagtttgttgaaattcattggcaggtgatctggttcagaaccaatattcacgaccattttacggcagaaaaaatagaccaatatggccattattaagccgataccacaaatattataagtcagcgcatagccatagcgatcggcaagaacgggggcaatagataaggagattaatgaaccaacattaatcgacatataaaatagtgtaaatgcaccatcaagacggggatctttaggtttatagcatttagctaataggcttgctgggtttgctttaaataaaccgttacctactgcgatagtggctaaagcataaaagattaaattaggatacataattgacatgccggtcataaaataaccgatagccaatacgatagcccctaaaacaatggttcgtttggtgcctaatagatggtcaccaacataaccaccaatagaaataagcccataaactaatgcggagaatgcaccaaaagtaataaaagcttgttcttgagagaatccgagtttactaacaaaataaacggcaagaataccttgtacgccgtagtaaccaaaacgttcccataattccacaaagaaaatcataaagaatggtttaggctgttgtaataaaccgactttagcgggtttatccatatctttaatgcccctaattattatttattttcaacaacgatgctatttactcaaattcacgatgaatgttacaccctgataacattatctgttgtatttagagtgatgtttgcaaatttaagatggtgatcggtaagtccggtagactaatatattgatagaatgacttctcaaaggttgatcacactgttagtaagattaataccagattgaaaaaaatagtcattaatttattttcaattaaagcgatttaattgatctttggtataaataatcaccaaaaagagcctattttgtttatattttaagcttaataaagctgataaaatataagcataaaaatagagtggaagggatatttatatcgtgactaattgattttctaaagaaaaagttttcttataattttaataatttcttttataacaaacagatgttaaaaatagtttaataaaacgctgatagctctattttaggataaagtgaaataaatatgcatgaagtgcgggtaattatttaaaatttaacaaaggtaataaaaacgcctttattaataatgaaggatttaaattgataccctcttcaaaataataaagtgcgtttttgtttttaatattagctaattaagcggtggttgggactaatttatgtttaacaggatggaagcgacgcttaaaataaattaagccatcgccatcttctcgaaccgcaatattttttatctctgccatataaacaaagtgagtacctacttggcgtacatcgtaaatatcaccttctaggctagcgagtgcattggttaatatcggttgctgtaatgcgccatattgccatcctggttgggtaaagcgatcagccattgccagacctgtcataccggcaaaatggcaagccatctcttcttgttcatgatttaaaatattgatacttaatttgccattttcttgaaacgtactattcatttggcttttactattgatgcaaatcatcactgtcggtggagtatcggtaactgaacatacagctgttgctgttaaaccacagcatcctgcatcaccattagttgcgacaatattaacggcagcacctaagcttgccattgcatcccgaaaaagtgggttagcctgtttttcatcagacattttttactcctactgccagacttctcatctgtgggcgtcttcacttaaaataaccattagttagaaaatcagaatttatctaactagtgccgcttcacaaagttgtaatgatcttgctgatttctttgctgtgtgaatttaaagccgtaacgctacctcgcattagccaagagatcaatctttctttgttacaacctgttaactttatctcaaaaagtcgtgagacaaccttatcgctggttgttattattcctaataagtcaagaaaagcgataggtaaatcaagtgatttagcctagtttgctgataaataacacgaaatgacacatattatcctgttattttttggggatattacgcggttttgtctgagaaaagtactaaggtcatcaattgctaaaatagcctaaaatgttagaaattgagtcaagtttatttatttgttaatatgattaattgtaataaaaagtctattcttagaatattattcatttataactataacgagttataattttcaccggctagattgagtgatttttcatcaatttatctatcaataaagagcttctgattatgcatgagtcattaacaatcgcgctattgcaagcacgggaatctgcgatgggattttttcgccccgttcttaaagagcataatctgacagagcagcagtggcggatcatccgagttcttgctgataagcgctctatcgattttcacgaattagcacaaaaaacctgtatcctgcgtccaagtttgacaggtattttgattagaatggaaagagatgagctaatttgtcgattaaaaccagtgagtgatcaacgtaaattattcgtttctctatcaaccaatgggcaaaatttatatgataaaatccagcctaagatagaagaagggtaccaattactcgaacaaaagttttctacagaaaaactgcaacatttatctatcttactgaaagaactgatagcgttaaatccagaaaatagtcattcaactgaaaaataacatgtgtgcaccaagaaaaaagagatgatgttataccatcatctcttttgtttttatgtaataggtgaaattaccttttacctaatacgtgtaagaagtgaatatgtttttcatactgatcgagtatgtcatgaataatttgttcttttgtccagcccatgacatcgtaatcttgcccaccttctttgagatgaatttcagcacgatagtatttatgctcttcatctttttcttcatctgttaagcctgctagcgcgaaagcgggttgagtatagaatcgtaatcgtacttcataaaagaagttcatatcctcacctaagtccacttcaaagccgatgcgatcttcttcttcgtcatggatatagcattgaataccttgtttgcttaattctgccgacaccatttccatggaaggattaacgacttcttccataaaacgttttacatgtgaacgtttaggaaaataagcaatatttcttaatcgacgttgccaaggaataggattacggctagccggtggggcgatagtcgtcatctgttggctatctcgcttataaacatccactcgcaatgccttaattaatccataaattgatgccaatagcacgatggcaaatggtaacgcactggcaatggtgacagtttgtaatgctgataaacctcctgccaataacaaggtaatggctgaaatacccattaatgcagcccagaagatacgttgccatacaggggtttctgaatctcctcctgacgctagggtatcaaccaccattgcaccggagtctgctgaggtgacaaaaaagacaatgaccatcagcattgcgacaaaggaaagcactgatgagaatggaaaatagtttaagaattcaaacagtgctaatgacacatcttgttgtactatattcgcaagaacttctgcacctttatctttaattaaatagatagcggtattaccaaagacagtcatccaaagtaaggtaaagccagctggaacaaagagtacgccgacaacaaactcacgaatagtacgaccacgggagatccgtgcaataaacataccgacaaaaggcgaccacgataaccaccagccccaataaagcagtgtccatccacctaaccaatcacttgattttggttcgtaggcataaagattaaacgttttactcactatttctgataaatagccccctgtattttcaacaaacgattttaaaatcaatacagtagggccaagaataatgactaataaaagaagaataacggctaaaccaaggttaagctcggataaaaaacggatacctttttctaatccagagacaaccgaaatagtagcaagcccggtgataacaacaattaaaaccacttgcacggttggattaattggaatatcgaatagatggtttaaaccggcattaacttgtagaacaccaaaacccagtgaagttgcgacaccaaatacggtgcccatcacagcaaaaatatctaccgcatgcccaatagggccataaatacggtcgccaatgataggataaagggcggaacgtaacgttaatggcaagccatggcggtagctaaaaaacgccagaattaatgccacgatggcgtaaatagcccaagcatgtaatccccagtggaagaaagtcaaacgcatagcttctttggcggcttcaatcgtctgcgcatcccctgtgggtggcattaaatagtgcataacgggttctgcgacaccaaagaacatcagcccaatacccatacctgctgaaaacagcatcgcgaaccaagcaaaatagctaaaatgtggacgagcatgatcagggcctaattttatttcgccaaagcgcgatagccctaaataagtcacactcagcaaaaccaatgctacggctaaaatataaaaccagctcgcgttggtgaaaaggttttcctgaaggtgccctagcttgtcattagcgagttcaggaaatagcgctgaaaaccctacgacgagcataataagtattgcggaggtgtaaaatacgggaggattaattttcatcctaattttttttggtgtgatttcattttgttggctcatagttaacctatttttgttatttttcttagacaagacttttcgatattgcaatctagcatgttagtggtatcgctaggaaagaaaagtttgtaagaaaatttgaataaaacatcagatgatcttgaagctttataaaagaacggaaataaattatatttttccgtaaggtgaagaaaattacaattaaatcaatttattatcatatgtttttagtcagcgtcttgacgctttaataggtttctcctgttgaaaaaaggatagtatggttacattttttgcttaatcgatcaactcctgtttgttttttgcacaaaaaaagccagtaaaatattactggctttttcaacatcaaaatttctgaaatgaaattatttattatcagcctttagagaatcaattttttgctttgcttgatcggtgagctcatcggctttatcaagcgctttatctttagtatcttgcgcttgctgttttacatcatcactggttttagccgcatcttcttttagttgcgctgctttgtcgctagcattttgttttaagttatctgcagtggtattagcgttttgtttcacttcttctgctttaccagccagtttgtcactttcattatttaaactttgtttgatttcatctgcttttgcacttgcagaatcttttagttcatctgttttttgtgcaatgctctcttttaatgcatcggttttttgatcggcttgtgctttaagctctgcagctttatcttcagcttgctcttttagcttggccgcatcttgttttaattcgtcagctgtcgctgatgcactctcttttaaatcagcggctttttctttagcttgatctgttaattcttttgctttgtcttgagccgtttcatttacttgggttgctgtctcttttgctttatcaataccttcatccacttttttcgatgaatcatcacaacctgctgtaatggtaacaagacctgctagaattaaagatgccagtaattttttgttcatgtttctctccagagaatgtatccaaaacatatcgatgatatctcgcataactagtattaaaagcgagaggttattgagttgatattttatatattatcttaactcccaataaaataagtatagtgagagtctgaaaatcaacaaggttaagtatattaagtgattaccactagtcaaatatattagatttgtaaggttaatatctgtcagatttctctcaatggtatgttttatgctttataattacagtgtgaatcgttttgcaaaggtgcttaagaaatggaatattatctgcttgtggttatcaagtttattattggttttacaataattttggctcatatgaatatttcagggaagacacaactctctcaactaactcccattgattttattggtaattttgttttaggggggattatgggaggggttatttacacagatgcaatcccgctttaccaatatgttattgtctttttgataggtgtattttttatttcttttctcaattatatcagtaaaaaatttaattttttccgagcagtagcgataggtaatccgatcccgattattaaaaagggaagatttattatggaaaacattactgagaagaaaaataagattgatattcttaatatcacttctaggttacatgcccaaggaattcattcttttcaagaagttaattatgctcaaattgaacctgatggacaaataacggtggtgtgtgatggtgctaaaatgccctctatcattattatgaaagatggtgttatccgaacttctgaacttgagcagatagaacgagatgaaaattggttaaacgaagagatgaaaaaacaacatatagataacccagaagatgtttttttagccgaattttgggatggtaaagtcaatttcattttgcaagacggtaagatcaaacacgatttcattccgactgctgagtagcaatatcctgtgaaagaataaaagcaacgattaatactatctcaagagtcgctatcgttgctctattttgatttagtattagttaaagtttgaatgtctcaaaatcactggcgatttgtgtattgtcaaatatagtatgacattccgctaatagctcgggggtttctttaggtgaatagcgactactgatatgagtaatgattaatcgcttagcattcgcttttttggctaactcagctgcctgtatggtacttgaatgtccacgactattggctttatcagccatatcatgtttaaaggttgcttcatggacaataacatcggcattctcagcgagtttaactgcattaggcgttggttgtgtatcgccaaaaatcacaatacaacgacctttgatctctgtgcttagataatcttttccatcaatgatccgtccatcaggtagcgtaacggttttcccttgttttaataatttataccaagggcctctaggaatattctctgtctctagcttgtcagcattgagtttacccggtttattgtcttcttctagacgataaccaaagcaggggacaggatgtgataatgcgccacaacttgcgcgtataccttcttcttcaaaaagaaaaccatcttgttctatttcaataatatctaaagggtaagtgagataagattggcttaatgtaagggctgtttctataaatgccttaatgcccgtaggcccataaatggttaacgggttttctgtgccccccattgaacggctacagagtagtccgggtaaaccaaaaatatgatcaccatgtaaatgggtaataaaaatcttattgatgcgtgatagctttacatggctatgtaagatctgatgctgggtcgcctctccacaatcgaacatccacagacttttttgtttattttgtaaatcaagcaccatactggtgacgttgcgatctttagaaggcacgcctgcattagtgcctaaaaaggtaagttccataatgaaatcctgatctccatggtgaatttttaacattcatcttaatcgtaatggtatctaaactaaataaaattctgcaactgtgattaaggtaatcttctcattaaagttgatatgaataatagtgtgaataaaagataatatactttatttactaaaattaaatttctctgattaacgatttaaatgtatctgtttttatacaaacagaatgaatggggcatattcttaatttgtttattttttttaataaagtttaaagttcttattgaaaaaataaaaaaagtaaaatttaaattatgattttttgagtaaataaacatatcttacaaattgaaatactttttgtgttttttttacaattttagtttttaatttttatcttaaaaagttgttttgttaatacaatgtaatgatattaattctgtctaatcagaaaatattccattatgaaggtttaatttctatatagttcttttttattatttggttacagcattatttaattttattatgtctatttcttagtaagttaatgctttcaattttctaattaatttcttgtttttcatgctgttaaatttaaccgcaatatttcaaaacaaccttttagttttaaattctattaaaaataatttattggttttttattctgaaaaatcatcgttattgaataataaaagttataatattgtatcttttttgtacttatatgtaaatttatggttatttgtttttttgttataatattaaaataataaaatttatttctatttataaaaatatatttcctttaattttttacactttatatctaagtattttgtatttaaaagtctataaatattctttttatgatgctatttttggtttttttatctaattacttattttgggggtaattataatttgcgtaagatgaaaaaaaatccaattaatatcagtgtattaataaatatatatttaattaaatttatcaggtttgacttaaataaagtggcagagaataataaacccaacttgatatgagcgttatctaatttcggttgttaattattatttattttatgtattgatgattaattatagagattaatttttacaatatatcaagatataccaaattcattgcgtatcttattcataaaagagaagtgtatcgcctgtatgggattatttttcttaattgaatgttgttgcttttatactttatttaacttttatattttaggaaaacaaaatgaaattaaaaaaactgcatttagttttagggttaggcttatctatcattgcgggctctgcattagcggcagatcaagggcatggtactgttgaattctatggttcaattattgatgctccttgttctatcgatcctgattcaggtgctcaacgtattccattaggtcaagtgtcatctagcgcactgaaagacggtggccgtagtgcatcaaaaatgtttaaaatcaaattattacagtgttctactgagacatataaaacagtcaaaacaacctttaccggtgctgaagctcctgatgttttagagggggctttaggtattgaagggatcgccaaaaatgcagctgttgttatcaccaatgcaggtggtgaacaaatcaaattaggtcaagcaagtgccgcccaaacattgaatgacggtaacaatgacttaaattttgccgcttatttacaaggatcttcctcaaaagctgctattcctggtgattttacagcaatagccacttttgctttatcttatcaataatagtcgtcaaataaagctttgtataaggatatacaaggctttgttaattgatgagctttcttatcgttaggacacttttgtcatcgcgctagatatcgatggtgagtaatagtaaaacgcgctctttttataaatacaaaaggattatcaaacatagtgatatttcatccgtaggggcattactgataattgactgttttgggctcgaatattactaaatggattagttaggtttacttatggctaaattattcaagacgattgatttaaatgttaaacataaaagtaagcagtgcagaggtcgttctgctaccacactgatctatttcgtgattatagggatggcaagtattgccagcgattcatttgctgttagcaaagatattgaatttaactcagatattcttgacttaaaagatcgaggaaatattgatttatcaagcttttcccgagcgggatatattactcctggcaagtatgagttaattattaatattaataacaatgaattaagtggaacttatcgtgttgactatattgtgcccaaagatgatcccaaggcaagcgaaccttgtatctcacctatattagttaagcagtttgcactcagaccagaatggttaaaaaagttaacttggaaagataagggtaattgccttaatgaggcatcgttaccaggtatgagcctgaggacagatttaggtagtggggttttttttattactcttcctcaagcttatctagaatattcatcaccgaattgggagtcgccttctttttgggacgaaggtattgctggattattgtttgattataacgttaatgccaatgtcagagcgcctagtgatggcaagcagaaacagcagatcaccgcaaatggtacggcgggggcaaatttaggtgtttggcgttttcgggcagattggcaagcaagttatgagcacactacaggtgtattgcatagcacagaaaatcactggaattgggatcaattctatctttatcgagcgataacgaaatggggcgcccgtttagtcatgggggagacttacttacgttcaaacctattagataatttccgttttacgggaataagtttacttacggatgagcaaatgttgccccctaatttacgaggttatgctccagagatcacgggagttgcaaaaacgaatgcaaaagtcaccgtgagtcaacaaggacggattatctatgagacacaaatcgcgcctgggccatttcgtattcaagatctgcatgatgcggtaagtggacgcttggatgttcgtattgaagagcaggacggaacaatacaagaataccaaattgatacagccaatattccttatcttacaagaccgggacgccttcaatataaagtatctgcgggtaagccttctcgattagatcataaaactgaagggcctatttttgcaatgggagagttttcttggggagtgaataatggttggtctctttttggtggcactttagtttctaaggattataactcggcctcgctaggttttggacgagatctaatgatgttaggtgctatctcttttgatacgactcattcatgggcaaccttcgctaatgagaataaacactatcatggcagttcatatcgaattagctattcaaagcgttttgaatctattgatgggcaaatcacttttgcaggctatcgattctctgatcgtcattttatgagtatggatcaatatttagataggcgttatcgctatggcgcacaagaaaataataaagagctttatacccttacactgagtaaacaatttcctcaatggggacttagtacctatataaattataaccatcaaaggtattgggatcgaccgaataacgactattacaacttctctttatcaaagtatctcgctatcgggaagtttaaaaacattaacattagcttatccgcttatcgtaatcgttttaatggcaatcatgacaacggcgtgtatttcaacattaatttgccttggcgtgatagagcaacgataagttataactcggtcataaataaagaaggtaactcacataatgtcagctatttcgatcgcattgatgataacaataattatcgtctaagtgcaggagttagtagtcgaggtaaaccatcggctgatggtttctttacacattatggtgatgttgctttagtaacggcttcagccagtcatattaacggcgactatacttcggcatctttatctttccaaggtggggcaacattaaccactaaaggcggggattttcaccgtagcaatatgccgggagcaacccgtttgttaattgatactcaaggtgtttccgatgtcccggtaaaaagtcttagtgccatatctcataccaatatttttggcaaggcggtgatccccgatattaatcactattatcgaggcagtgcttctatcgatcttaaacagctaccagacaatgttgaagcactacgttctattcatcaattaactttgactgaaggcgctattggctatcgtcaatttgatgtgattgccggacacaaagcgatggcaacagtacagttggctgaaggaggcgctccgccatttgcagcgacagtaacaacgcttaatggtcgagaattaggtgtttttaacgacggtggaaaggtttatttaagcggtattaattcaggcgatgtcttgtatgtacattgggatggtaaaaaccaatgccaattatccattcctaaattggcggatacacaactgatcacatcactgcttttaacttgctttcaaagaaagccgactatttcaacatcattcctagaaacagataaaacgcaagcattacctcaacattcatttcttagtaaataacgctaagtaataacaataattgattgatagagagaagagtaattaaagatgatggcatctaaacatttatttatggtaactaccaccttattaactggaatggtgtttacgtcgcaagttggtgcgacaatcgctttagatcgtacacgtattatttttaatggtgctgataaatcagtaagtctgagtataagtaatcaaaacaaagaattaccttatttagctcaaggttggctagagaacgagcaaggagaaaaaatagaaacacctcttattgtattacctcctattcagcgtattgaacctgggaataagagccaagtgaaagtgcaatcattacctgatattgcacaactacctcaagatagagagagtgttttttattttaatttacgtgagatccctccacgtagtgataaacccaacgtattacaaattgcattacaaacgcggataaaattgttctatcgaccaaaatctatttatgccacccaaactgatttaagtaatccatggcaggaaaaaattaccttaacaaagcagggggagagttatgttgtgcataatcccacaccctattatatcactattgttgatggtctaacggatctgaaagggaaaagcttagaaggatttacccctatcatggtagcgcctcgagggtaggaaaaactcaatttaacggtttctacgctgggggcttctccggtattaagttacatcaatgattacggtggtcgtccaagattgaaatttagctgcgatagtcgtgaatgtaaggtgatagaaacagaccaaggaaattaataggtatatttatgaaacagcagattaataaaaatagtcttgtatcaatattggtactattgagcttttttatcacaacaaatgtaactgctgtgacaccggttttgtcaagtacgggactatcacaaaattcgcctattacacctatttatccgatccctatcaacataaaagggtacgttatcgctcaccctccttgcatgatcaatgagggcaaaacggtagaagtgaatttcggtgatgtgctaagtacacgagttgatggcttaaattacaaacgtctggttgattatcatccaagttgtgaacaaatgcccattaatacactaaaactttctgtcgaggggaatggtactttttttgatgccaatgcattaatgaccaatattaccggattaggtatacgtattttgtatcaaaataaaccacttaagttagggcaggcaattaattttacttatcccgatttccctgtattggaagcggtgcctgtgcgtgatttttctactcttcttgtgggaggagacttttctaccacagcgacattgcgcatggaatatcagtgaggagataacgggaatgtttaataaacagaggatattctttttcataacgttactttcatcattttcattaatggctgatgagacggcaaataaggcgacaatcactaacagcgaaaataatttgaggttatttggcacactatttattccccctccttgtgtgatccaaaacaatgacatgattgatgttaattttggtcaccaactgggaacgagtcgcatcgatggcattaattatacaaagaccgtcaattacacgttgcagtgtgaagaaaatgcaaatggttgggcattaggtttatccattatcggctctgcaagccaatttgatgcggctgctttacaaaccaatataacggatttagccgtacatctcacgatagatagtgagccatttattttaaataaacggtttgttattacctctgataaaccgccgattattttagctgtgcctgtaaaaaaatcaggaagtaccttaacaaaaggtgcatttgaggcaacagcaacgctacttgctgaatatcaataggagtatcgggatgatattacaaagattatctctgagtactgcaatctttgccactgtgatagctatggctaatgctgatcctaatatgcgttttcatggtgagttaattgatgagccatgtgtaataaaacccggtgatgaaattattgtcatcacgctggataaagtgactgatagtgctttttacaatggagtagaaagaactaaaagccagcaatttgagatccatctatcggagtgcgatctctctatgaataacaaagtttccatcacatttaaaggtgatgaaaataaggcgatggcagggaaaggttttctagcattgagtccaataagtcgagcctctggtattgctattggtctagaagatagcgatggagtcctcttacccattaatcagccatcaaaaaatatggctttgctttcaactaataacacattgaggtttagtgcttttatacaagcagaacctaccgcaattgctaatcaatcaataaaacgggggccttttagcgccattgctacattccatttaaattatgactaatgttgacttgaggtttatatgcttatacctaatcgccaattaatcttttacttatttactagcatgttgatatatccagcttcctctatagccgctattttttcttatattacagaatcaaaacctgtgggtaatgaggggacaggggctgattacacttttattatccagcgttgggatcccgagccaccaacggctttaaatccttgttataaaaaaaaaccttgttatataaccataaatcatcgtcatcagcctaaccagtctggaggttcagcgaccagaactattttaagtgatgggcataaatatcgaagaatggaagatctacgtattgctgttatgaaagaattaggaggattcccttatggcccaggagttgccattcatcgatatgttgatacatcaaccatacaagagtgcgttggtatattttatcagccaaatgcttatggttttgctgaagatggctatttattaccgggttctatttgtgcaattgctcccccacctgttggacattgtgatgtgttagcccattctgttgagttggattacggcaatgtgggggaaaatgagttagacaatgcggttcgttctcagactgtgaatgtgacgtgtaatcgtgatgtctctttacaggttgttgcaacaggaatgaataatcgtcaagtcccactacgtaatgacaatagcttatatgctgatttatatattaatgataaatctggcgaagagggagaggctatctttgtcgcaaaaggcaaaatggtttctatacaagtgagttctaaattgagaaccaatggacatgttgctccagggtatttttctggctctggcgcgttgattctaacgttaccataataataaaaggttgaaatatcatggtgaaatatcgtcgtgcaaatattgatgtcaatgcactggtaggtaagcgcatacaaaaaaggcgtaaagagttaggttacacaggtagccaattggcggcaaaactaggggttagccaacaacaattctcacgctatgagcgagggttaaacaaaatagatcttacttatctagtgctattagctaaattcttaaacacacctatttactggttttttgaggactgtattacttcaacgtcggtcaaaagtggcaaaccgctaagtcgacgaagcaatcttttagccaaaaaagcactagacgcatttctgtattaacctttacctcttacaagaaaaagtccttaaataagcaacctatttaggtcaggctaaggggatgttttcccttaatgatcgctatagcgatattgactgtcgagttatgttgcactcattaggcttgcaatcactatccctaagcgagcttagatgggtagtgattgctttatgagcattataaatgtgtagaaagagacgaaaaaatcagaattaattgtattttgaatatatctcttatactaagttaaattattaatgataaatctttttaatgtttttctgtgggtaaatggataccttctaagatagagtctattggaataaaaatgattatatttcaaaaaaaattagtacaccaaatatgaccgggtttattaaaatcaagtatcattaattaattctttattaagattactatcgtgattatttatattaaatgatataatttttaatataaatcctaatttgaattaaaaagaaaaaaatatctatattcttattgtaaaataaaacgtactcaattattgatattaactttttaagtaatctattaataaagaactattgtgagtttcgcgtttcccacatattgataaatcgttttgagttacttgctgtataaataaccgtatgggaaatattgcgatggcctaaatagtcttgaattaaacgtgtatctctgcctaaatccgccagtgcgtagccacaggcgtggcgtaacatatgagggtgtggactaatagaaacattggcttttttacctaaacggcgtaataacccataaacttgttgacgggaaattggtcccgttttttgtgataaaaatacccattcagaatctgattctctccagttttctctacttttcaaccagttgcataaggcttcatattcctcatcaataataggttgtgttgttgaaagcccaccttttaaacgcctgacatagagtattctactttctagatcaatatcgcttaatgttaaattacatagttcgctaacacgaaaaccatgtaaaaaacacattaaaaacatacagtaatctctttcgggatacctaccttccttagcttgctttaaaatagcattcacttcaaaacgtgtaagaaatttacgttgcttcattttcgtaaccttttcaattagataataaacaacaaaagtcagttgcagcatcactatagcaagtaatatgcatcaataaagggttgtgttttttttatactttcttttttactcgttaattttaaacaagtttattgaaagtttgccaatttttagaaaacgaaaaccattgataggtaagagaaaggagaatagcaggtgatatttacacctatttagagaaacaatcaaaatacaccaaattgtttactattattctccggcttctaacttaagtcaaatatattattgggtatatattcttaattatttaacatattgatattaaacaattttttaaaaaatcaaaataatttattactttgtgcaaaacactgaaataaatttttttacttttttaacaaactatagtatttgcacttagaattatatcatctttttcctaaattttaagatgaaaaaatctaaatagtcatacttgcaagatgaaaatctttaactaaacaatttggtgtattttgtttcgtttctaacgatatttcgcggcgtttgaagtggacttaaatataccaaaattcccgagctcaataaatgagccattcaattaggaataatccaatcctaaatgaattaattattttagatgtcttcatcctttatatttcaggaaacaaaaagatgaaattaaataaattagctttagttcttggtttaggtttatctgttgttgcgggttctgctttagctgcagatcaaggtcatggtactgttaaatttgttggttcaatcattgatgctccttgctcaattactcctgatactgaaaatcaaacagttccactaggtcaaatttctactgctgcattaaaagatggtggccgtagtaattctcgtgactttaaaatctctttagaaaattgtactacagagacttacaaaactgttcaaacaactttcactggctctgaagcaactgaagttttagaaggttctttaggcattgaaggtatcgctaaaaatgcagctgttgttatcaccgatgcgggtggtaaacaaatcaaattaggcaccccaagtgctgctcaaaacctgcgtgatggtaacaatgatctgaactttgctgcttatttacaaggttctgcatctgaagctgctgttccaggtgactttactgcaatcgcaactttcgcactgacttatcagtaagaaaaaataagttctgtacaaggaagtacagagctttaattcctgtctttacttttaatgatttttcttactaacggagaaaaatatgaatcgcaagatggcaccactattgctatgccttgttgccagtttagtgactgcgccaacgatagccagtgatgtaaaacaagataaaaacatgcatcagcgatttgggtggctcaatctacaaggaaccatattagagccgtcatgtgcaatatcagcgggaagtagtgatcaagtgatcccgctaacgacggtatctatcccaacgttagtcactgaaggtcaaggaccgattgaatatttttctatcagattaacggactgtacgctaattagccagaaagggcaagaagcggataatccacgttttatcgcaacgttcgatggtccttctaatggaaatggcaactttgagttatccggtgaggccaaaggtgcttcattagcgatagcggatcgttatggtcgacaagctattccaggacaacccctaccgcccgttggcattgattcgcagtcaatggcattgctgtaccaagctcgaatagtcaaaaataacgatacgccaaaagcggggaattaccgtacgacgctgcgctttaagctggaatactattaaatggatcagggttggataatttatggttagatcattcaaaaccgtttgtttagagaagcgagaaaagagaaaaaagcatgctattcggcctgttgctatattgatctatttaattgttactggggcatccagtctttcaaattcagctttagcgaatagcgatattgagtttaatgctgatattttagatcttaaagataaacaaaatatcgatttatctgatttctctcgagctggctatattatgccagggcgctacgaatttgttgttcgtataaataataatgaacttcccgatatctacaacattaattatgttgtacctgcagatgatcccaaaggaagtgaaccttgcttacctcctgaattagttcgtcaattaggactaaaaccagagtggcttgataaaattcgttttaacgataatcaaacttgccttgatacatcatctattcccggaatgacaataaatgccagtttaggtagtggtaatttattattaacgatacctcaagcttatttggagtattcagcaccaaactgggatccgccttctcgttgggatgacggtatttcagggatactttttgattataacgtcaatgcaaatgtgactgatcctgctaaaggaaaacaacgtcagcaagtgacggggttaggtacgttaggggcgaacttaggtgcttggcgttttcgcgctgattggcaagcgagctaccaacatacgacagggatccctcaaagtacagaaaacagctggaaatggaatcaatactatctctatagagctatccctcaatgggaagcgcgctttgtcatgggagagacttactcgcgctccgatatttttgatagtttccgttttaccggggttcatctcgcaactgacgacaatatgttgccacctaatttacgtggatatgcgccagaagtcacaggtgtagcaaaaaccaatgccaaagtgacaattagccaacagggtcgagtgatctacgagacgcaagttgctccaggaccatttcgtattcaagatattaatgatgccgttagcggtaaattagatgtacgtgtcgaagagcaagatggctctgtacaagagtttcaaatggatacggcaagtattccttatttaactcgaccaggacgagtgcaatataaattctcggcaggtaaaccttctaatattgaccataataccgaaggccccgtttttggtatgggggaattttcatggggggtgagtaacggttggtcactttatgggggctcaattgttgcgggtgattataacgccttgtctgcgggtatcggccgtgacttaatggcttttggtgctctctcttttgatgctactcactcttgggcaaaaattcctcgtgatgataagcgttataacggtggctcttatcgattaagttattcaaaacgttttgaagctattaatagccaagtcacctttgctggttatcgcttctcagaacgcgactttatgaccatggatcagtatttagagcgtcgctatcgcgatggtaatgctgataataacaaagaactttataccattatgtttagtaagcaatttcctgactggggattgagtacttacttaaactatagtcaccaaacatattggaataagccaactaatgataattacaacttatcgttagcgaaaagcgcggatattggtcgttttaaaaatatcaattttagtctctccgctttccgtaataaatttaatggcaccaatgataatggcgtttatatgaatgtcagtatgccttggggtgatcgtgcgaccatcagttacaacactgtcattaataagagcggtaactctcataatgtcagctattacgatcgaattgatgacaatagcagttatcgtgttggcgctggggtaagtagcaatggtaaaccttcagccgatgcttattttatgcattatgctgatgcggccttagtcaccgccagtgcaagtcatatcaatggtgaatatacctctgccactttatcgctacaaggtggtgccacacttacgccgaaaggtggagcattacaccgcgttagtcgtacaggtagtactcgcttacttattgatacagacggtatcgctaatattcccgtgaagaattttggtgcgatttcccataccaatatgtttggtaaagcggtattgccagatattaatgattactaccgtagtagcgcgagtatcgatcttaatcgattacctgaaaatgtcgaagcattacgctcaattcagcaattaaccctaaccgaaggggcgattggttaccgtcgatttgatgttatcgaagggcaaaaagccatggcggttattcggttaaaagatggaaccttcccaccatttggtgccagtgtcacaacagaaaaagggcgtgagttaggcatcattaatgatggtggaaatgtttatctaaccggtattaataccggggatgtattgagtgttcgttggagtggtaaagagcagtgcaaagtacttattccaacattggtggagaatgtgcaaatttcatcactgttattgacctgtagtgatgatggcacagcaacctctactttcaatcaaagagaagtctccttacctaaaacgaagtttctatctcgttaaggttaaggaacaggaaataaagataaaaacaacttcagacaaagagtaattaaagatgatgttattaaaacgctcatgcattgttgcaaccactttgttaatgggaatggcatttactcatcaagctgttgctgccattgcgctagatcgaactcgtgtcatttttaatggtgccgaaaaatcgattagtttaaatgtcagcaatcaaaataaggacttgccttatcttgctcaaggctggatggaaaatgaaaacggcgaacgtattgaaagcccactgattgttttacccccgatccaacgtattgaaccgggtgataaaagtcagattaaggtgcaatcattacctgatatagccaaattaccacaagatagagaaagtgttttctattttaacctacgtgaaattccaccacgtagtaataagcctaatgtactgcaaattgcattacaaacgcggatcaaattattttatcgtcctgcatcaatctatgcctcgcaaacggatttaaccaatccttggcaagagcagatcactttaactaaaaaaggtgatcgcttcgaagtgaataatccaacgccttactatgtgacattagtcgatggattaaccagtttgaaaggaaaaagcttggatggctttgaaccattaatgatcgcacctaaaagtagcggcacgataaatctgagtgcttccatgtttggtgcttcaccggtattgagctacatcaatgattatggcggtcgccctcagatgaaattcacctgtagtggcaatcaatgcaaagtaacagaaacggcagctggaaactaaataggtctgatttatggttatggaacagtggtttagcccaagcaaggcagtgttggtttttattctggcaacatttactggaggcctgagttctactgctgttgctaacttacctgcaggagcagtaataagagcgacccccgggattgtttatatcaatattactggaaacgtcatcgctccacctccttgcttaatcaatgacggcaagatgatcgaggtgaattttggcgaagtaatgagtacgcgtattaatgatagcaattataagcaacctatcgaatataccgcgacttgccaaaaaagaccgactaacgccatgaaagtctatataacaggtaatgcaacagggttcgatagtaatgccctacaaactaatattacgggattaggggtacgcattctttatcaaggtaaattattaggattaggctcagcggttaaatttacctatcccaatttgcctaaactagaagcgatccctgtgcgtgataatagagaaacactagttggtggagattttgttgccaatgccacacttcatgtagattatcagtaaaggggcaacacgatgaataaattgcaatctatttgtctgattatattactaaattctacagcagtaatggcggccgactcgcctaatttaaaattattcggaacattattagtgccacctccttgtgttatcagcaatgacgaacgaattgaggttttttttggtaagaacgtcggtattaataaagttgatggtattaactataccgaatcggtgaattataccttggtatgcgacgctaatttaaaaggttgggatttgggattatcaattatcggacctaaaacccagtttgatgaggcggcattgcaaaccaatattccagatttaggtattcatttaactcaagatggtaagccttttaagctaaatgagcgtattgcgatttcaccagattcgcctccggttattcaagctgttccagtaaaaagaccgggaagtacattgcctgaaggggcatttgaagtctcagccaccttattagcagaataccaataggagcgttttgatgaaaataaaaacattatcgatccggttcatattgggtctatctgtatccatagggttaacttcagcggcttttgcaataccggacaacctctattttcacggcatattagttgatgagccttgtaccataaaaccgggtgatgaaaccgtggtactcgattttggcaatattcctgataaaaacctttatgcctataaaagaacgccaagcaagttatttcaattacgtctgtcagaatgcgatctctcaatcggtaaaagcgtcaaaataacctttaaaggagaggaaaaccaagcaatggcaggagaaggatttttggcaataagtccgggcagccaagcttctggtattgcggtgggattagagtctgaaaatggtaatgctctacctataaataaagaaacagacaagatgtcattaactgcgggtgacactattttgaatttttatgcctttattcaaggtgagccggatgcgattgcgaataagtcgattaaacgtggtccttttagtgcaatagccaccttctatttgaattatgactgataatgaagattgaggttttacatgtttatatttaaacgatttccggcgatatttatcttaatagcggggcttttctcagcacctgcgatggcctctattttttcttatataacagaatcaacagggacaccttctaacgccacttacacttatgttattgagcgttgggatccagaaacctcaggaatattaaatccttgttatggttggcctgtgtgttatgtcacagtgaaccataaacatacagtaaatggtactgggggaaatcctgcatttcagattgctcgaattgaaaaactacgtactttagctgaagttcgtgatgtagtacttaaaaatagatcattccctattgaagggcaaaccacccacagagggccttcattaaactctaatcaagagtgtgtgggattattttatcaaccgaattcaagtggtatatcacctcgaggaaaactcttaccaggttcactatgcggtatcgcaccaccaccagtgggtgcttgtaaaatatctgaaggtgcggtgaaccttaactatggtgatattgatgaagctagtttaagtggtgctaagcgctctgaaacaatcaatgtaacctgtaatttagcaatgaaagtgttggttatcgcatctggctctgatagtgggcgggtacctctgcgtgcagataagagtttatatgctgatttatatctaaacaattatcctggtgaaaaaggcgttacggtaaatgttccagcaggcggttcagcgccagtctctgtgagttcaacgctacgcacgaatggacgggtagctccaggtcgtttctccggttccggttcaattattttaaccatgccttaatcatgataatgggtgaatattatgatgatgaattttgattttgcgaatatagatgtaaatgcttctgtaggtaaaaagatccaaaaaaaacgtaaagagctgggttataccggtatgcagctggctaaaaaaattggtgtcagccagcaacagttttctcgctatgaacgaggtatgaacaaaatagatctcagacatttagtgttgttagctctctatttaaatacacccatttattggttttttgaggattgctacgtaaaaaagccttcattaaataataaaggaatagataagcgcaattatgttattgctcaagcaacacctgatgcttttcattattgatattcagtcgatatgacatattgatgttttgctagatattacatttctttgattgattaccttattggtagggcaagggcaaccttgccgtttttttatgttgaaagctgacttattttatctcttctaatacacccatttattatttttctattatttactacgctattattaggcttttctcctattttattatcataccgcttagtcacaaatagacttcttttttaacatctcttagttaattcttgtaatgatgtgactataaatagtaatttcagccgttattatcaggtttattagagtattcgaagctttttatgtactttttaaggagtttttagttctgtaaaggttaataaatagactttaaaatgttaaaaagtgttaacttgcgcgcattttttaattttagatattataaattgattttaatgtttgttatctataattgatagtatgttttttaacttattgttttgtattaattaaattatgttttttttcattgtttgagtgttaattttagataatatcatttatatgataggtatttacggatagtaaaaacaaatttggttgtgtactgtgcattttctgtttttttataaaaaggataaatcatgcaaacaaaaaaacagggaggaagtcgttttctacgcacagtggaatggcttggaaatgcactcccccatcccgttattttatttattattttaattgctattttacttgtatcttcagcggttggtgaatacttcggcgttacagtacaagatccacgaccagaaggcgctaaagggcgcgctgaagatggttatattcatattatcagtttacttgatgctgatggtatacgacgtattcttgctaatattgttaccaattttacagggtttgctcctttaggaaccgtactggtggctttactcggtgtcggaatagctgaacgagcgggattattatcagccgttatgcgtttagtggttatgaaagctccacgcaaaatgaccacattagccattgtatttgcaggtattatgtcaaatactgcagctgaattaggatatgttgtcttgatcccgctatcggcaattattttccattcgctaggtcgtcatccattagcggggattgctgctgcgtttgcgggagtatctggcggatattcagctaacttactgttagggactatcgatccattattatcaggtattacacaacaagcagcacgcattattgacccaagctatattgttggtgcggaagcaaactggtactttatgtttgtcagcacctttttaattacatttttaggctacatcatcacagaaaaaatcgttgagcctcagttagggccttataatggtaatgaattagatgatgaagaaactgatctaaaaaatgctgcgcaagttacccctcttgagaaaaaagcactatgggcagcaacaggaacatttattgtgatggccatcattctggcattcactgtcgtacctgaaaatggcatattaagaaaccaagaaacaggtttaattggtaactcaccattcttaaaatccattgttgtattcattttcttattttttgctatccccggtattgtttatggttggatagctaagactatgcgttcagataaagatattgtcgatgccatggcaaactctatgagcacattaggtctttatttagtaattattttctttgctgctcaatttgtggctttttttggctggacaaatatagggcaagtgatcgctgttaaaggtgcggctttacttaatagtattgatatgccaagtgggttgctatttttgggctttattttaatttgcgcctttatcaatttaatgattggttcagcttccgcgcaatgggcagtaacggcgcctatttttgttcctatgttaatgctggcaggttatgcaccagaaactattcaagcagcttatcgtataggtgattcggtgacgaatattattacgccaatgatgagttactttggtttaatcttagcggttgccacaaaatataagaaagatacgggtattggaactatgatctcgatgatgttgccatattctattatcttcttaattggttggtcactgttattctacctttgggtatttgttttccacttacctgtagggcctggatcgccaatttattattcaccgcatgcgggataatattattctttagataagcttatacaaggatgtataggcttatttgtgtttatctttatgtgttgctaacttttctgttaattgggttgcatagtccgtatgtagaaactgtgtgtccattcctgcctgttgtaattttaattcgagtaaagtgagttttttttgtaactgttcatctttgatgccagtttctgaaagtgaacttaatatttcggctaaagataatgcatcttttctatcttgcatttctgggggcaaaaagccggcattcttaagcaaatgataactagtccgcaaagactcaggaacatgactgttatcatctaataccaagggtttaccttctcctggcaaagaagagagttcaccatttttcaacgccttttcaatgtggcgctccgcccattcatcaagaattgacattattcagcctcaacattaatgactaatgtaatcaataaaataacaaacttaatttcacttgatcaaatcacataaaatgatattatatttttatattatataaaaatatatattgttatagggagagtaaaatgagcaagtaccaagaaatagtaacagacatctcggggaatatgggggcattatctaaaaatattcctgaagttatgaagtcatttatgagtaccaccaaagcaagctctaaagatggtgtgctcgatgctaaaaccaaagagctgattgctattgccattgctgttgctaatcgttgcgatggttgtataggttttcatactaaaaccctagttgaattagggacgacagagcaggagcttgcagaagcattgggcgtcgcgatttatatgggagggggcccttctgtgatgtatgcgtccaataccatgggggcttttaaagaatttagtcaatagtatttaataaaatttagttatcattatagccagcatattgctggctttttgggttttaaagcttatagtggctcacttatattttagtttttcttaatgattactaatggtattagttatattcgtgaaatgccaaaaggaaattattattgataacctttttttataaaaacataaaggaattgtgagtatttttacgtaaaaaaataaaagataacaatttgatttttaataatatttttttatttctctctttttattaataaagctttaataaatatatttgaattttttataaaatattatgactaattgatgttgataaataatgtagtgcgtttatttgaggaattatgaatatagcgatgacagaaagatataaatggttattgtttttcctatttatcttattaacttattttattcctttagaaacgcgactgttatggcaaccagatgaaattcgttatgctgaaattagccgtgaaatgttagtttctggcaattggtcagtgccttatcttcttgatattcgttattttgaaaaacctgttttaggatattggatcaattgtattgctcaatggctatttggtgaaagccattttgcggtgcgtattgttgtagtaacatcaaccttattaacaggatggcttatttataaagcggcaatggtagtttggcgcaatagcgctcttgcttttaatgctatgaccgtttttttatcttcttttctggtattagcaataggtacttataatatattagatcctattgtgacgctgtttgtgaccgctgcaatgtactcatttttagttgcgttatcgaccccgaataaaaagggcaaaataattgcttatatgggtattggctttttttgcgcacttggttttttaacaaaaggctttattgcggttgttttacctgcattagtttttttagtcatggcaattagtcaagctcgctttaaagaagtggtttgctattcctctattgcactgttagctctcgctattaccgctggaccttgggtgattactgttgcattacaagcaccggattattggaattattttttctgggttgaacatgtacagcgttttattgctaaagagtctgctcgctcacaaccaacgtggttctatatcccgatagttatattgggtgtattgccttggctaggttttttatttggtgcattaaaatcagctttctctttaaaaaaaggtacactctattttctgctgtggtttactctcttttttgcttttttctcagcctcaaaaggaaaactattaacctatatgctaccgtgctttgtgccattatctattttaattgcacactatatcgaagagttaaaagatagacctgatgagaaaattagcaaagtgaatgcatctatcaatattgcttttgggctaatgggtatatcagccgttatctattctttatacagtgccaaatttgcgctttatgatacgaatgaaacgttaaaaatagtgttagcaataagtgggtttttattttggagtgtgattggtgcgggggcgctgtttagacaaacacagtttttaacgatgttttgctctatcggactaagtttagttattggctatgcaatcccagaaaagatagaaagtaggagtacaccagaaaatattatccaacgttattatgagcctttgagtaataaatcgtatcttttaacggacgaagttggtattggtacatcacttgcttggggactaaaacgtactgatattcgtttaacagagacgaaaggtgagttggcttatggtttaaattacccagatgtaaaaaataaatactatagccttgaacagctattagcattaattgaagcaaaccaatataaaggggtagcgattgttttagtcagacctgatagaaagcagattttgactaaattgactacattaaaggaaaagccgatagtagaaaaagagggcgatttaacgctggtgttctttaattagctgaattgctttaatatttattttgctgtgatgttttttctcagtgagtattgatcatgtattacgattttgcttttcgtgtgatttatatgtgatctagattaaaaaacagaatttgtcggtaaatatattttgctctttgtcgttttaatggtaggtttaaaatgtgtccattagaacggagttagctaagcactatatgacaagtcacttaactttatcagaacccccacccagacaaaatgtactcatgaatagggggaatttatgctgatttttttaactgaatgtattatcggtctggcatcaattgctcttactcaccgtgtattaatgttgtacggtaataaaaagaagtgatgaaaatacgatatgctaataagctaagtaacctattagactaactatcatagacgcaaagccctataacctgattaattatagggcttttattatagtattgagttaaattaaatatatattttcagctactgaaaatagttttcaataatttttattttttcaatatctagagtattggtatattgatgtaataatgcccaagcttgaatataatcatatttggctttgattaaatcttgctgcgctctatataaaagctcttccgcattaagcacatcaaccatcgttcgctgaccaccaatatagctttttcgtgttgcatttaattgtaacttagcggaactaacggcttgctcaaaagccatcaatttaatatggctcgttgagcaaatttgatattgatatcttaattcctgcataatattttgaataatagcatccctttcaaatgcactcatctgatattttgctgtcgactgacgcattgatgccgttgttttacccccattaaataaaggcatactgacataaaaacccacgttagcagattggtatttctggttaatggtattattactatcagaattactactagagtaagccgcataaaattgtactgttgggaaaaattctcctctatttttctcaatctcttgtttagctatcgccatttcatgacgagcagattgtatctttaagttattttgtatggcatttttttcccatgtggaatagtcatcgggagccagtgattgaagaacaaactttgtatcagttagctttgcgatgtgctcatgagtaggcaattgtgaaccgatcatagcactgagtttgtttttagccttttcaatttctaattgaagatcggtatattgtgactgggttaaatataaacgagtctctatttcagcaatatctgttttggttccttctcctaactcaaataggcgttgacttgaagctagttgtttttgatagatttcttgctgtgcttgatttagcaataatttatcttgtgtataagcaacttgaatataattatcaataagtcgaataattaattctgaaaatttattttgataatgactgtctgctaataatgttttaatgatagaagctttgtattcactaaatgcggtgtagtcaaatagtggttgactaataatcgcgttgacagaatagctttgatagttttgatactcaactgttgttattttatcctgaaatatatttattggataagccttacgttgccagttgcgaggattatttttgtaattgacagaaatattgggtagcaattgtgataacccgatattttcatactctttacctgctacttgctcttttaccgcagcattaaatgtgggatcatgtttaatcgctaaaaaatagagatcagacagtgtaaccgctgaagctggcaagcttaggagtcctacggaaaaaagtgtaaaaagtttttttattagcatcattattcttccgttaatgaagtatggagcctatccaatactggtttgaaaagataatttaataatgagcgatcgccagttttaataaatacatcaacgggcatacctgctttcaatttatttttattatctgctaataatgtataatcttttatgttaataagaacttgataatatggctcagttgttcgttcatcaattaatctatcggcagaaataatcgttacttcaccaggaatttttggcgtggtattttgattaaaggcactaaagatcaaatcaacgggaaggccaggagttaccttatcaataagatgcggagcaagacgcgcttcaataacaagttgatgatcttcaggcactatatccatcaatgtctgacctgtttttacaaagccaccttgggtaaaaacagaaagatccatcacagtacccgatatcggtgcgataattgccattttagctaatttatctgtttctataataagttgtttttctgtttcactgatttgtaattgtattttatttagctctgttcgagctagttggtggaaattggcattacgttgcaatattctttgctcatattctaatttttgtttttctaatgcacttatttgcccaaaagtctcgttgagttgattattattttctgctaattctcgcaccatttcttgatatcgatgacgaggaatatatccttcattagctaatatttgtaaatcattaagctgattttgtagattactaatttgactctttttattctgaattgagcgctttagatgggttaggcgaccagtaatgccatcgatagctgctttataaccatttatttcacttattaattctgcacttttttcatttaataaacgattttgttgtagtaataacttctctctattttcagtagatgaatagtatttatcgctattatttaatttaaatgaagtttgttgattaagttcagcgtataatctttgttgagtgatcagtaaattatcatattgctctgataacgattttactaaggcttgagattgaatagggcttagttgtatcagggtttgtccggcagataccggatcaccattttttacaaaaatatgagtaataataccttcaacagaagactgtacactttttttattccccgatattactacgtttcctattgcaggaacgcctttatcaaggggcgcgaaagcagcccaaaaaataaaaattgctaagcctaataaaaccacagtccatccaataacgagaaatttctttggatcatctgaaattttttctgacagtggtataacatttttttctatagtcataatcaattccgaaaaattaagcgttatttgaggttgctggtgttgaagaaatagtgtttgccgtttttgtgatagttggattatttaattcagcaataacagacgccgttggaccgaataatttggtgtttccatcaaatatcactaataatttattagtgacagaaagtagctgtttttggtgggtaattaaaataacggtttttttatgctgttttaatgtttcgatcgcctgtgttaacgctctaatacctaaatcatctaaattagaatttggctcatctaagacaactaacgtgggatcgccatataatgctctggctaatgcaatacgttgtttttgtccgccggataatccttcaccgtgagcaccaatttgggtttcatatccttgaggaaagcgtaaaatcatctcgtgtacatgtgccattttggcggcttggatcactttttgaggatcaacctcagtaaagcgtgcaatattttcagcgatagtgccggggaaaagggcgatttcttgaggtaaataaccaatatgtgggccaatttcttctttactccactgaaagatatccgcattatctaatcgcacaatgccttttttgacctgccatataccgacaataaattttgctaaagaagacttaccagaagcactcgggccaataatacctagtatatctcccggtaatagagcaaaattgatattatttagtaatattctgtcactgtgtggatacacggcttcatcgatattaacaagtaattggccttgaggcttaggtaaggccatttttttattttcttgagggtatgtttttaataaagttgtcaatcgattgtaggctgctttactactatcccaacttttccatacattgatcacttgctcaataggggctaatgctcgacctaaaagtattgaaccggcaatcatcattccaggactgatagtattatcaatagcaagccatccccctaaacctagcattaaagattgtaatgccatacgtgttacttttgtgatagcgttaataccagctgcattatcactggcttgtgtttgtgcttgtaaatatttgaaatgagaggtttgccattgtttacgtaattgactaagcattcccatcgcttcgatagtctgtggatgttctaaatgatgactttgtattagttgtgcttgattggcaaaattgttcgctttttttaaatgatttttagatagatattcattaaggatagccaaagcaaataagataagggcaccacaaagtgcaaataatcctaaccaaggattaaataaagtaataactaaaaggtaaatagggaaccaaggtagatcaaagaaagtgaatatggcatgactagtaatgaattgtcgtaaagtaattagatctgttaatgctaacgttggattaatattcgctattttgtttaatttttctcggtaagctgcagtataaatgcgtgaattaagtgataaatctaatttattactcatacgtataacaataatgcttcttaaatattctaatcctcccataaagataaaaagagctaacataatgattgttagcatcaatagtgtcatttcattacctgatggtaatactcgatcgtaaacttgtaacatataaatagaagggactaacattaatatattaattaaagcggtaaatagcccaatagagagaaaaacttttcgtctctcttttatgatacttgttatctcgttattatattttatttgtggcatgtggtattcctgatttaatttgtctatttttagtactaaatatcttttgttggtcttaaagaagcgtctattttcactttatttattattatgaatatcaaaatagcttcatttaaagcaaaagagagtaggagaaataactttctcctacccaactatgacttaaacaataaaatcagtttcgtaattaacaaaacctacgatatcaattttaaaatcaggattataattatagccataagcattaatggctaattcagaagcattggttacttcattatagctaagagttgcttcgccagcatttcctgtaaaattatcaacaaagttaagaattttgctactaaatgtatcttgaattaatgttgataaatcaattttatcaataccggttttgaaatccattattttatctgcggctgatactaaagaatctgcaatttctttataaataaaggtattgcttcctgtgccaccatgtaatgtatcttgtccacgaccaccataaatagtgttattaccactatggccatagataatatcgtctccttcgcctccaataagagtattatcagcatcattaccatgaataatatcattaccaaaaccaccaattgcgttttctatggtaacattttgtgcaatagaaacatttttctgtaatccccccacatcagaaaagttcccagcacgtaaatcaatcagttgatcttgatagaagcctgagaaatcaaatgtatcgttaccaccactatcccatacagagaaaattaatttatcattgctatcagtagccgtataataatcaatcccagtatttgaattgaaaccatatacatcatcacctgttctggtagtcgtatttgcgccatagagatattgcatagcagaaatatcatgaaggagaggggctccggcataagcaccttggaagtgggcgcctgtttcatattcatcccaatagctcattactgtatattggcgactatcttccgcataatcagattttaaataacctggaacattctgacctgcgttataatcaccaggatgcataagacccagtgtatgaccaatttcatggataatagttaaacgaccataattacccaattctggtgtagtattacctgcataatgataatcactaaaccatgcttggccagaaagatcttttccataagcataggtattaggcaatgttgcataagcctgaaatgtgccattgggatcatagatattaccaaaagtaatatctgtttttacgtcagaagccttcattccatcaacattcccaacagcaacttcagtaaatttaatatttgcaatgtcagaccatgcatctaaagattttcttgcatgctctttttgtaattcattaaattcataaggattcttattaccaaattgattaaatttgccttcccattttgggaatgaataagtcacctcagcgggttgcccaataacatatttgccattccaagtggaatcttcacgggctatatgttttcctgcggtatcataatcaaaagaaggtaatactttggttgaatagttatagaagatcccgcttttatctaataaatcagaaatattagataacccaacggctttttttaataaaaaagatcccataatatcctccagatataaatttaggttaagtttattttcatactgaaaatatatttatctggcgaatgccattgaggataaagatagacattaattattattaatctaggggggtaaaataagtttttaaataattgtgaagtaaagtgtgttttaagtcagaataatttaatgaggtgaatataagtatagttatattttatttttagatgatttctattgttagttattgttttataattgaaaggaaaattttacttaagtttgatttttaatttaattaatgggtttgtttaaaattaatgtatcgtttattatgttaagttgtttgatgtttgatgtttgatgtttgatgtttgatgtttgatgtttgatgtttgatgtttgatgtttgatgtttgatgtttgatgtttgatgtttgatgtttgatgtttgatgtttgatgtttgatgtttgttttatttctatagtaataataatattggtgaataataaacaaaataaaaataacataatgtattatttttatactgctaaaaaacagaacatctaaataaaaaaggactacaatataatcataatccttattgttaattagaataatatctttatatatctaaaagatcattgtaacttaatataccctcaagttttataaagatagtcgaatgatggtcgttattggctgttgaaatagttattgtggttttatttgtatgaatatcattatgtaaaactatttcattttcatttcctgataattgttctactcgtttcatttttgatatatcgatttttttataattttgatcaacaaaaataattttgtcttcattcgtattaaaatcaaaaattaaattataacttttagcgcctttatagcataagaagttaaaagtatcatttccttgttcaccatataatagattagtacctaatccacaataaaatatatcattcccttcaccaccttgaagttcatttcgtcctgcttttgatatcgaaaataatagatcattgcctttaccgccaatgaatgtattatttccataataatcaacaagggtatcatctccatcaccaccaaagagtttatcattacctttatttccatagaggtaatcattacccatactaccatggagaatatcattacccataccaccatggagaatatcatcacctatacctccatagagataatcattgcctatatcaccatagagaatatcattacccataccaccatagaggtgatcattacccaaaccacccttgatagtatcattaccatcaccacctataagttcattattagcactatttcctatgatagtatcatgacctgatccaccaatagcattttcaataatcgttttgtaggcaatagagatattactccgtaacccgccaatatctgaaaagctaccttcatttaggttaataacttgattaacggtatatagggaaaagtctaatgtatcaattccccccgaatcccaaatacaacttactaatttatcttctatgctttttaaggagtaagcgacacgtccggtattagaatgaaatccatagatattattttcaaggcgtgtggtcatattttcgccatagagttgttgcaataataatatatctagcagcataaaggtcatgggataaagaccaccaaaatcagcatgctctgaggttggtatatcataacccataacagaatatttcaatgaagctaatacatgatttttatctttatattctaagtattgccaactatggcttagcccgagtgcatgaccaacttcatgcaaaacaactttataatgatatgtacctggctgatatttattattttttagtgtttcaattagagtattggttttttttattatcagaacagtaccattatctttaaaattgaaagcatcaccaatattaccttctgtttttatataattatcaagatcattttgatgtattatcttataatattggtgtgatgataaatttaaaaatatagttccagagtattggtattgttcatcaatatttatcttttttataggggttgaatacctgctaggataggttgcaaaacctctggtggtatatgaaaattctattgaaccatgactaatatgaaaatcatcgtaaaaaccaaattttatatcggcatcgaattctggattagatgcaacaaactttgcttgtgttatataggcaatttcattaagaatatcggaaataacttcttgttgatgaggatatatggttgtttgtgtattataaaaataaggatgtatactattcttatttttattaatactattttctatatcctctatatctttttctaattcagctattttacttattgaatatttatttctataatattttaatgaagcgatttctttttcttttttttccttaagataggtcaattcatatactttagcggtatgttttattgattctattctatctttttctgttactgaatattttttatttgagtaatttctttttttatcataatcagggaatatatatgttattttggtgatattactatgtggttgtttaggccaaccatacatataatttataacaattttaccatcaggtagatagaaataagttggtttttttattgagttaaaactattcatactaaatccttttaccaaaagagaattttctatatttcttaattttataattaatggagatatatatgggaataaattttataaaaacacactatttattagtatgttttttagttgattactattaattatttatacgcatattatgctagattattattaatgtaataattgatggttatttatagagtaataatttaaaattttacaaatcatatggtgaaatgtatttataccgcaaagagttcatcgtggttaaatataccgacaatctctatatgtacaatggacttattgtcgttagaagatgttgaaacatctatgatggtcttattggctggtttgttataatttaatgaaaattcatttttacttcctgataacttatcaacttttttcatttttgatatatctatttttctataatctctagtgatcaacgttattttatccttgtttttttcaaaatcccaaattgagctattgctttcaactccctcataacagaaaaaattaaaggcatcatttccttgtccacctgttatacgatgagttcctgtgcccaaatatatttcatcatcaccttctccccctagaatgatatttctacctggaagccctctatctgttgaggctacacagatccgatcattacccttaccaccatctaacatattagcaccataataatcgataagcatatcatctccatcatcaccatagagcacatcatttcccaattctccgtatataacatcgtttccagagccaccataaaataaatcattgccatcaccgccatagaataaatcattgccatcaccacctatgaggttattatcaaaaggatttcctatgagagtatcatcacctttaccaccaatcgcattttcaataatcgttttataggcaatagagatattactccgtaatcctccaatatctgaaaaacagccttcattgagattaatgacttgattaacggtatatagggaaaagtctaatgtatcaattccacccgcatcccaaatacagctcactaatttatcttctatgctatttaaagagtaagcggcgcgtcccgtattggaattaaatccataggtattattttcaagacgtgtggtcatattttcgccatagagatattgtaacaataatatatctactagcataaaggtcataggataaaggccaccaaaatctgcatctttaatatcaggacacttatagctcataactgagtatttaattgaatctaatactttatgcttttcatttagtatgtattcccaaatatgaaatagccctagagaatgacctaattcatgtataaaagtatgatatacaaatgagccgattttatgtttattttgttggtattctttgcgtaactcattattaccccttgctattgtaatagttttatcattattaatataatatatatcatagatatctgcctcattttctatatattcatcaatattatcttgcttaattgttttataatattcgcgtgaagaaaaatcaataaatatagtacccggatcatcatgttcttcatctggttttatctcttttataggtgtaccttcctcgttaggatgactagcactgccttttcgataacctgaaatgaattttgtaccagatatattaacaaattgattataatagccaaattttaaatcagcattggtatatggtgatatttttttaaaaaatataggtacgatatctgaggtgtgttgtaatatttcttcgataactttttgttgatgagggaatattgtttcttgagtggagtaaatatagataggtatattatctagtatagtataaatatcatttgctattttttttattccttcttctaattcttttattcttttttttgaagcctcactatctttatcttcaatggtgtttaattcttgttttttttgttctctaatatttactaacctataatattcatatatatcttttagcgttttttttctcatgttttctgttaatgggtttttattttttataatttctcggtatgtgttatgatctggaaatgtataagttattgttgttatttcatttggtgatttttttggccaacctatcatagttcctgttgtgatgatccctttaggtaaatagaaattagtcgtttctttaacattttttactatagtcatataaattcctttcttatttaataataaattatttgcattaattattataaaataaacttattctataattagctaattattgtatttttgttgttttattactttttgaaaaaacacatatcagtattttttatattattagttggttgttatatttatagaaataaagtttatagaaacacactatttattagtgtgtttttagttggttatcgttattatgctggattattattaatataataattaatgataatttatagagaaatagtttaaaattttaacaaatcatatggtgaaatgaatttatatcgcaaagagttcatcgtggttaaatataccgacaatttctatatgtacaatggtattatcgtcattagaagatgttgaaacatctatgatggtcttattggctggtttgttataatttaatgaaaattcatttttacttcctgataacttatcaacttttttcatttttgttatatctatttttctataatctctagtaatcaatgttattttatccttgtttttttcaaaatcccaaatgaaactattgctttcaacgctctcatagcagaaaaaattaaaggtatcatttccttgtccacctgttatacgatgagttcccgtgcccaaatatatttcatcatcaccttctccccctagaatgatatttctacctggaagccctctatctgttgaggctacacagatccgatcattacccttaccaccatccaacatattagcaccataataatcaataagcatatcatctccatcatcaccatagagcacatcatttcccaattctccgtatataacatcgtttccagagccaccatagaataaatcattgccatcaccgccatagaataaatcattgccatcaccaccgattaggttattatcaaaaggatttcctatgagagtgtcatcacctttaccaccaatcgcattttcaataatcgttttataggcaatagagatattactccgtaatcctccaatatctgaaaaacagccttcattgagattaatgacttgattaacggtatatagggaaaagtctaatgtatcaattccacctgcatcccaaatacagctcactaatttatcttctatgctatttaaagagtaagcggcgcgtcccgtattggaatgaaaaccataggtattattttcaagacgtgtggtcatatttgggccatagagatattgtaataataatatatctactagcataaaggtcataggataaaggccagcaaaatctgcatctttaatatcagcaaattgataggccataactgaatatttatatgttaaaattacatcattttttatattttttaaatatacatttatgtgcattagcccgagtgcatgacctaattcatgtataaaacaaagatattcatatgatcctagtttgtgtttacttttcattgtttcgttgagtaacacatccgtactttttattatagcaacttgattattatcatggtaattatataaatcaccgggattggcctcattttctatatatttatcaatattatccccgttttcccatttataaaattcatgtgtagctaaattaataaatatggttccagggatatcataatcttcatttggcccgatctcttttataggtgtaccgttatagttaggatattgagcaaagcctccatttcctctcgtcataaaaaaagtagttgaatctttgtaaaaatgattgaaatagccaaactttaaattggcatttttttgtataggtactctagtaaaagtaaggtctgcgaaatctgaagccaattgtaaaatttctgtgataacttcttgttgatgaggaaatatcgtcattggtgtagccaaaaaatataaaggtatgttctttattatctggccacttctctcactctttgattttatatcttgatttatttcctcaattcttttttggaaaccctcactatctttatcttcaatagcttttagttcttttttcattttttctatttcatagtctaatttgtaatattctgctagctcctttaatgcttcttttttttgactttctgttatcggatgtttatttcttatattttctgaccgctcactgtaattaggaaatgtataggtgagatgcgttgttccatctattgaatttttaggccaacctgatatagcgcctgttgatataaccccatcaagcaaatagaagaaagttggttttttagtgttttttattaatttcatataatgtcctttttatttaaagataaattatctatgtgtttttttacaaaataaattaatgtttaatagcaggctaattattgtctatttgttttttaatttcttttttaaaaaatacctgtcagcatttctacattattagttaagattattgttatgtgtttgtattattggcaacatgatgtattattatttttaataaaaaaggtaccgcaatattattacagtgccttttctattttttctgttactgaattttttggtttaaataatctcttttttatcataattaggaggtatataagttatttgtgtgatattactatgtggttatttagctcaaccatacatatcatctataactattttaccatcagacaaatagaagtaagttgtttttttattgaattaaaactattcatactaaattctttttaccaaaagagaatgttctatatttcttacttttataatgataggagtatatatagaaataaatgttataaaaacatactatttatttcgtatatttttagttggttattattaatgtttatacgcatattgtgctgaattgttattaataattgatgattatttatagagaaataatttaaagttttacaaatcatatggtgaaatgtatttatactgcaaagagttcatcatggttaaatataccgacaatctctatatgtacaatggacttatcatcgttagaagatgttgaaacgtctatgatggttttgttggctggtttgttatgatttaatgaaaattcatttttatctcctgataatttatcaacttttttcatttttgatatatctatttttctataatccctagtgatcaacgttattttatccttgtttttttcaaaatcccaaattgaactattgctttcaacgccctcatagcagaaaaaattaaaggtatcatttccttgtccacctgttatacgatgagttcctgtgcccaaatatatttcatcatcaccttctcccccttgaatgatatttctgccagggagccctctatccattgaggctacacagatccgatcattacccttaccaccatccaacatattagcaccataataatcaataagcatatcatctccatcatcaccatagagcacatcatttcccatttctccgtatataacatcgtttccagagccaccatagaataaatcattgccatcaccgccatagaataaatcattgccatcaccaccgattaggttattatcaaaaggatttcctatgagagtatcatcacctttaccaccaatcgcattttcaataatcgttttataggcaatagagatattactccgtaatcctccaatatctgaaaaacagccttcattgagattaatgacttgattaacggtatatagggaaaagtctaatgtatcaattccacccgcatcccaaatacagctcactaatttatcttctatgctttttaaagagtaagcggcgcgtcccgtattggaattaaatccataggtattattttcaaggcgtgtggtcatatttgggccatagagatattgtaataataatatatctactagcataaaggtcataggataaagaccgccaaaatctgcatctttaatatcagcaaatcccatgcccataactgtatatttatatgtttcaattgcactattttttatatttttcaaatatgcatctatgtgctctagccctagtgcatgacctaattcatgcaaaaaaacataatatatttgtgatcctagtttgtgtttacttttcattgtttcgttgagtaacacatccgtactttttattatagcaacttgattattatcatggtaattatataaatcgccgatattggcctcattttctatatatttatcaagattatcccgtttgacccattgataaaaatcatgagaagctaaattaataaatatgctcccagagaaatcataactttcattttgcccgatctcttttataggtgtaccattatagttaggcttactagcaaagcctactgtttctctcgtcatataataaccagttgcaaactgcttgtaatagccaaactttaaattggcatttttttgtataggtactctagtaaaagtaaggtctgcgaaatctgaagccaattgtaaaatttctgtgacaacttcttgttgatgaggaaatatcgtcattgttgtaacggaaaaatataaaggtatgcctttttttatctcgtatcttctctcggtctttaattttatatcttcatttatttcctgaattctttttttgggatcctcactatctttaatggcttctagttctttttttctttcctttatttcataatctaatttgtaatactctgcgatattctttagcgtttcttttttttgactttctgttatcgggtatttctttcttatattttctgaccgatcactgtaattaggaaatgtataggtgagatgtgttgttccatctgttgaatttttaggccagccagatataacccctgttgatataatcccttcagataaatagaaaacagtcggttttttagtgttttttattaattccatataatatcctttattatttaaaaataaactatttgtgtgcttattataaatagtttgcatttttattatttaataatttgctaattattgtgtttttaattttttatttctttttgaaaaaacacatgtcagtattttgttacattattatgttgttatattattagttgattgtattgttaataagataatatgtttcctgttaaatagaaaaggcactgcaatatgattacagtgccttttctatttattattattatgatagttccctggtgaggctatctttttgataacacctaatttaaaacctaatttatgttatcagctaggtactactgcgatttgtttgatttctatgtgaagaaggtaatattttttattatctatttcctttaaactatatatggctaaattatttgatgtctattttttatacatattctttatctttggtggagcaataataaaatgtcttatatatcaagagaaaagatagattacttgtccattggtcatcgactgcgtgcttatcgtattgcctcctcattaaaagctgaagatgtagctgaaagtttagggatctcccgtgccgctgtctatcgattagaaaagggtgaaatcgttaaaattgagacattagataatcttgctcgattacttaacacctcattaagtagcttattaggtattaatacggagtattactctagcgctaatggtttttttgaacgaatgcgccaacttgaaacacaatcttcccatatttatacccatttcgaacccttttcttatttattaacctctgattgttatgataaaacgcttgtcgaaatgttaacagaagcctctcctgaaaatgcgctaacaaagaagcaacaagaagttttatctattttaaaagagcgtaaaaagcatcaatcattacactcaccgcatatttataatttaattagtcaacagcaaatcgaaaaatttctttatgttggtatgctaggctctgttaatgtaagtaaagccattcaacaagaaagaaaacaacgcgcaaaacaagaaatcagccatttaattgaaaagttagagcaaaaaaatagtcatcttaatattgcgattatttcagatacgatgccatctttaacctttcaattgttttatcaaaacaaagcacctctctctttagcggttagtccatttcgtttaggtgaatttcctaatgtaagtacgggtattgcgacagtatcttcatcaacagaagcaatattccaatatcaatctctgtttgatacgttatgggcaaaagcaataaaaaatgatgatgccattacacgcttaaaagagattatcagtcattattgattagctagaacacctaatgtttccgctaagatatctgcagctattgcaatatcactaaactccgtaaattcatctgggtgatgactaatccccgcaacagagggggtaaaaatcatcgctgtcgggtataaagatgccatattcattgagtcatgaccggcaccacttaacatagtcatataattgatatcgtgtttttgacaaatattttcaataacttggcaaattgagtcatccagttttactggtgattcagccgaaataggttgcactattatttttacaccaaaatctttttctgctttctcaacactgtttgttaaacgctgtacaacacgttgaatactgtccgtatcaataccacgaatatccacggagaattttacttgccctggaataacgttcatcgagtttggtatgacattaagtttaccaatggtacctacggtgccgtataccgcttccgtacaggcagcatgattgatatcagtaataatacccgcactcgccactaacgcatcttgacgttgatacattggcgttgcaccagagtggtctgcatggccatttacggtgactgaaaagcgtgttggcgcagcgataccattgacaattccaattgttttttgatcgttttctagacgtttaccttgttcaatatgtaattcaacaaatgcactataacggtctgatttaagtaaacattgatctaagttttcatgctgataaccaagggattttaaaacatcaaagaaattattaccttcatcatctctattttgttcccatcgagtacggtcaatttttcctgttagcactttacttccgatacatgaaaacccaaatcggctcgattcttctgctcggaatacaattaactctagatcacgtttcagttgttgtggtttgtattgcatcaaagcataaaaaccagcaataactcctaaggcgccatcataagcgcccccttggggaacggtatcaaggtgagagcctgttcctacggcgggtaatgttctatcttgccccggtaagcgagcgtagagtgtgccaataccgtcacgatagacttcaaggcctgcctctttcattacactagcaagatagagatgggctgcttcatcttcttcgctataggcaatacgtgttatccctttgtcatggttatcttttttataaatttgcattgtttcaattaatgttttcatatcattaattgaaaagtctgttgctgtaattggttgagtcataaggttattctccggtgttttctgtaaaactgtctaaaaaatgagacaaataaaagattaaaaaagccatcttttatagatggtctgctatttttataatcgttacttattatatttacttctcagaatttatttcgtcaatggtaaataagagggattttatattctgtgagatagggcgtaattaaaaagagatatatttctgacttatttcataaatgaatcattattgtgttaaagatgttataaaagataaataaaataagatgttgtactgatattaatctttcttatttttaacataaatgaaaattattctcatggggtatattggatgatattctcatccaatatattaataattaaatctagaagaagtatttaaaacgtgctcttacaccataacgatctttatcgctattttctatttcaatatctttaccattaataacagaataatatgcacctaaatagattttaaaattatccatatctaaaatattagataattcatatgaggaatagagagtgtggatattatattttcctgggccaaatataatatcattattgttatcatcatcactattaatagtatatgacttaatattattatgggcatagatatagcctaattgtaatttacgccataaaatattagtacctgttgtaaagtcgttctcatcgttagcgtctaaataagcggtattccaatttattgtgacaccattttcaggattttgttgtagattgctccagcctaaagttaatccataaccgttgcgtttggattggtctctaaattcacccgtttttttatcatcataaccataagcattattgataatatttttttctaaggctacagcaactttaaaattattgttattccatgcaataactgggcgaaaataaataacatttttattattatatagtttatttccgtgatattccttgttagcaaaaatagacgttccatcttcaattaataaattagtttcaaaataccaattattatattggctattaaacatcatgctaccaccgctattgcttctccctcgaccttctttcatcatgtagatataaccaaaaccatcactataagtatcatttgcagtgttgcctgaatattcaacaaaagtatcttgattaagcgggaacatgtcataagcttcataacgacctaacttaaattgccaacgctcttttttaccaaaataaaaagcggcatcatcaagtgataccttaccatcaatatttgccagtggttgaacagtgaagcctgcataatttttattatctaacagacgctctccgtctaagccaattaatatacgcccattgatcccccatttatcataatcgccatagtctttttctttacctgagcgcatgttaatggaggttagctgaccttttttacttgcaatatctgtattaaattcaacatcaccatataacttgagttttccataaccggtatttgtttctatcagcgatgatggtggcgcagttatagtttcgctagtttgtgatagattgttattaagcgcctgattttgttttaacgcattttctaacttagcggcacgttgctctgctaactcagctcttttttcagcggctaacgttctctcttctagtcgagctaaacgttgttctatcgataattcatttgtattggcgtgagcaattgtcggcacggcaatgccgatacaagtcgctatcgcaaggtgtttgatgttcattgtttattccttatatcgggaataatggaggtttattatccccatgtttttttattaaaaaagtgaatgaatatctatttcagttaatgagtgaacagctaaatctgcttctggtaaggggccgtcagcagtaacgccaattgcatacatgcccgcttgtttaatcgattgtattccagcaatcgagtcttcaaatccgatacataaatgtggtggaatgtgaataaactcagccgcacgcaaaaatatttcaggatcgggcttgccttttttgagtgttttaggatcaacaattgccttaaaataatgcttaatgcctaatttttctaatatggttggggcattttctgaagctgatgcaatagcacaaggaatgtgattattgtttgcttgttctattagatctaaaacacccggtaaaatatcttttggagtaatattatttaataactcaagataatatttattttttgtttctgttaatgattttttttcatccgcagaataaacatcacttttattaccatgagataaaataagctctaatgactcaattcgacttattccttttaataaatggttaaactctttgtcaaaatcaattcctatttcattagatagttttttccacgcaatatagtggtaattggcggtatcaacaattacgccatccagatcaaaaataagacctttagtcattttgcgtgtctccatttaactttaatactaataacgtattggcggttagcttatgcgtttgatggttaattaaaatagtactgggcttatcacttaaaatactaatttctttatgactgagattaatttgatataaagtagagcgatgcaataatttaaagcttagtttttgccattgttgagggagtgaaggggtgatggtcaacatatcctgacgaatatcaacaccggcataagccatgatggtggtatttaatgttgccgccatgacaccagtatgaataccttcggcagttgttccaccttgaatatcattataatctgaataaagagcatcttgataaagttgccatgacaaatcatgtaactgtatttgttctgcgagataagcatggacaatgcgtgacagtgtggaaccatgagaggttctttctaaatagtaatgtagatttttttcagcaaagtgcttagaaactgaataaccaagagaggtaattagggaatgtacggtttgcttatctaagttattaaataacatcagggtatctgcttgtttagctactttgtaatcatcggcagatttattttctttacgcaaaattctatccatacgatagatattgccgtatttttttcgatagctttcccaatccagatcttttaattgaaaataacctgagaactgttcaataatttcatgagcatcaatattgatagcaatacgatttttaacttcttgtattttattgaaaacgctagattggctgtttagctgttgtaattttttagaaaaacgatcattgtttatgaacatctctatttgattaaacaaccaaaccaccattaaattagtgtatgcgttatcttttaagccaccttcaagtgagtctgcgtatttctcatgaaattcatccggccccataactccattaatatgaaaacgttgatcgccttcatcccactgacattggtctaaccagaacaaggtaatgtcattgagtagttcaagtccatactgttccataaattggtgatcatgagtatttagccaatatagccacacattataggcaatcgctaatgagacatgacgttgacgacaactgtggtcggcatcccattgccctgataaggggtttaaatgcagtgtctgggtttgctcactaccatcatgccctgattgccaagggaacatagcaccttgaaatccttctgctcgtgccgcaagacgcgcagcaggtagcctgtggtaacgatatagtaatagttggcgtgcggtttcagggaagtgcataatataaaatggcagaataaagatctcatcccagaaaatatggcctcgataggcttccccgtgtaaccctcgggcggtgactgaaacatctaattgatgttgctgattgctaaatggtgatgcggatgacagtaaatggaaggtatgtaagcgtagtaatttttgggtcatcagatcgccagaaatcgagatatcggcactatcccataacgtttgccacgctttttggctatttatcaattggctgtgtaaaggttgttgttcccaattaaccacatcttgccatgagtctgggtaagccgtagaggttgttacagcaacacatttttcaagttgataggtggtattttgttgagcgttgaaggtgatggtttgttcaacaagcgtatctgaaacatgacaaacaatatcttcatttgcaaagaaatcaccacttattgttgacgataatccgatccctatttttgactgatctgtttgagctaatataaatgcgtgttgcttattcgctccagtttgtagcacatgataatgatggggattaaggctacggtagcgttgtacaccgtaattataagtatttccttctaggcgagttataaccgttatctcacctgagaaatttaatggtttaaaggtatataaaatggcgtaatgtgacatatcagccatattggcaaattttgtacaatgaatatcaagttgctgtccttcaggggtttctacacgccattggctagtgaatacacccgtttttaaatctaattgacgtgttaaatggtgtgttatcagttgctttggatgaagatattctcccttaccaattttaagagaaataaattgtccattaggtgcattaacaaaatcttcattaatcacctgatggttttctatttgtgaacttgcttgattatataggccagcaatataggtagcagggtagtgctcatcacttatagtcatttcgggcaaagttcctcttaacccaatataaccattggccgtagttaagagagactcttggcaatattcatcttttcctgtttctaagcctgaatattcaattgaccaagcaaagttattggcaactgtaaccattttttcttctaaatcatgatgatgttcaagctgcgctttattgatataaataaaaggtttattaaatatttcagtaaagaaatttgataaatttattactttattatcaatggttttaataatagcgctatccgatttattacttgtcgaatatatcaaaccaccttgagcagagttaaatttatgattaatagctttagccatatttagccaatcaaggtaatggctatttgtggtattaaatgaataatggcttttttctgaaagatatttaatggtgatatcagtatcagaaagaataatagagatataattcatgtttaacctttagtttgagattaaattaatcgacttgcaaggtgcctgctttttctttatagcgatagaccagaatggttaatccaatagggacgacaatagccacaatcattgctaataaataaactaaccaataagtaggttggatagataaaataccgggtaatccgccgacaccaataccattagatagcacattatttaatccacaaatcaaacccgctagcgcagcgccaatcatggcgcacagcataggaaagccatattttaagttgacgccatacatggctggctctgtcacacctaaataagcagagatagctgccggaatagtaatttcttgttcatttaatttgcgactaacgataataatgcctacaacggcagatgcttgagcaatattagacagagcgataatcggccaaataggtgtaccgccataactttgagtcatttgtaaatctatcgctaacgttgtgtgatgtaagccggtgatcaccatgggggaatagaaaaaggcaaaaatagttgaaccaataggggcaaaatcacctaacattaaaaacttgatcagttgggcgagaccatcacctatgcttctaccgatagggcctaaaataacatgggcaacaaaaacggcgacaataagagttacaatcggcacaataactaattttaggtaatcagggataaaacgacgtaatttagtctcaaaccatcccagaaatagtcccgctaaaatcgaagggatcacttgggcttgataacctactttctcaatagtaaataaaccaaaattccaaacctcaggaagttgtgaacctaaattgtaagcattcattagctgtggagaaactaaggttatacctagtacgatacctagtgcaggtgtaccacccatcttttttacacttgaccagcaaatactcacaggtagaaaatggaagatggcttcacaaggtaaccagagaaaatcatatattggtgttaaccaaggataaaaataagtgaggggtttattatctgatataggcatttcgccaataacatttcttaatcctaacaataaaccgccgcaaattaagataggtaataatggaacaaaaatttcggctaaattggcaatcagcttttgccaggatcccatattctttttcgcatcagattttatatcatctttagatttagcttttaatgaaagcttatcaattaataatttatagtagatatcaacatccataccaacaataacttgaaattgacccgcattattaaaacagcctttaacaaaagatatttttttaattttatctatatcagcaagattgggatcattcagaacaaaacgtaatctggttagacagtgtgaaacgctaataacattatctgaacctccaacaagagtaattaactcttcaatggcttggttgtcttgaggtatcgacatattaatattctcataatagtagggttatttttaatatatcgagatctttctttttatccaatgggaacgttcccataacaagataaagatcacagttaatgatcattaatttatttgatcatgggtttaagtcatgacttgatataatgattttttgtgcaggaatatttttttctagcatttgtatcaatatgttagcagcttcttgtccactttctctaaaacctaatcgatagaatttagtttgaggaaataaaaaggtgagtagatcattacgaccgatgcaggccacctcaatatgatctattttctgttcggctaaatatttttgtacaccaaaggccagagaatcggtcgcacataaaatagcttgaggcttgcttgctaatgcttgtttggcaagtaaatagccactttgataattaagttcaccaagttgagcttgagatattaattgatgttgctggcaatattgaagataagtttgataacgtaataaacccgttgtttcatcattaatttggatcccgataaaacttatatgttgataatgtttgtctcgatggaaataatgcattaaagcgttaacagctcgttcatcgtcatgacaaatggaaacaaaaccttctagtggtcttgctataacaaccattttttgtttccaacttgctaagttagccgcattgatccctgaaaatgcaaataatattacgccatcgattttctggtgggcgagcatttttaagttttcttctactttggcttggctaaattggctttctaaaataatagggtcaatgttgttttgataaaggatcggtaatatggcactaactgcttgattttccgcataagaatcaaggcgagtgacgataataccaaaagaacgattagagtacccccgcattgctcgtgcagattttgacggtgtgaatttatatttctcaataattgagttaacttttttccttgtttcttcattaaccataggatcttgattaagtactcttgaaacagtcgatttgcccacaccacaaagtttggctatatcattgattgttaacttttttttattagtatctgtcatgagcgtttttctgtatttatctgctgtgtgataaagttattgtagttttagcaggttgttttccacaagtgattcttttactgtttgatttagtctaaaaattgtacgcagatactaccacaatcgtaaaaaagagaattttatatttgtcttttttgtatactaataacaataaaatgagtatacattgttagatgagaataaataaccaccatcgttttgactaaaaacagaaagacttctttgccaaccttcttttacatataaattgggaattattttattgataatttcactgttattatcgttaataaggatctgtgtagatgctagcttgtagctagttttcagtttggttatatcaaaaaaagattttctatacactgggatcaaatcgccgttataatcaataacacctcgaatacttgcccatccttgctcctcccctaaagtaaacattaattctaaattagctttagtatcctctttatcataaataattaactttgcttcacaatttattacattttctttttcttgattgaagtaaaaactaaaataaatcattaaacttaaaatgataactaatacactaatagcactatattttttcattttttattatccaatacataaatagacacacattgattatgcaagaaattaataggactaaacttttttttacataatattaatgatgttcgtgaataagaatcactttcagttatatagatgaaattataatctgaataactagaaatataattatcaattaaattttctttttcctcatttaatatttctttattacaaaataaattatattttttatatgttccgcagttactatagttatataatttatgctttctactatctaggtaattaaaagtaaaaataacaacaaaaaataagactatcaatgtaaatataataataaataatttcttttttgataaagatatgcttgttttttttattgatgataaagagtgatctttattattaatattcgtatttatatcttcttctatttctttttttatgtgaggaatatcactaattttattttcattgattaattttatatcttgaatattattgtcagatagtttttcaatactaatattgtgattaatgatatacccttttcgaggaacggtgatgacaatctcatcatcgatatctagctcattaaatgcttttcttaataaaagaatattttgatagaaagcgctattagttataaatttttctttatctccccagccaattctaaataattctcgttgcgtaactaattcattaacggtaataagatgtattagcattttagatgaaggtgctaaaattttcttttctttattaagtttttttgaaaataataaatttttatcgctataaaatataatgtcatcattaattagatacatagtgccgccaatacgtcatttggatatttattcttcttaatgctagaaaaggagtattttttatatataaagctaaaaaattattttttcaagttaaaaaaactaaaaaatttgtttatcgcattttaatacatttaaataacaattagaaacttactggtaacaaataaagcaagatatctatttatttattcgtatagattaactatgtgacttttattatttaatattataagtctctataatctttaggaattaccattatttaaatttatttataatgggggtgttactctgggaattagtggaaagcttttataaataaattggtattggaattaaatttatttaaaaatgagtaaaatcacttctaaaattaaagttaaataaatcaattaagttgattttggtttttgtctaacgtgttgatattaatgttattttttgtgaattttgggagttttgtagtttttttgctaacacgcattgtaataactcatgtagcatttattgcatcaacaacattgcgaaacaaagttaaaagttagttttaataaaatacaatcataaagcagtaactggcatgctcgtattttagcatgatatatcccatttttataaagctaatagaaaatagattatggaaagagaaaaatacgaaattgataaaacttacgatactaaagctattcatcaatacttagggaaagagatccgttcaaaaagaaaagcgataggactaacaggtgaagatttagctaaaaagttaaatgtcagtcaacagcaggtatctagatatgaaacagcagagtcaaaaataagctttgaaaagctattgttaatatctgatgttctagatcttaatattcaatatctattaaaagttatcattagtgataaatttaaaattatttctgatgattagcttttaattaaattctatggacaagattccaatatggatatttatatttttaatagggatgcgtgaataaggatattcttttatgagatagcctatctcaatgtcggtaaatactaaaatagtcaaatataaaggaaatgatgtatgaaatttaataaaatagcattaacagttctattagctacttcagctatttctttaaatgctatggctgataatgctaatacaggtgttatcacatttacgggttctgttgtaaatacgccttgtaatattgctcaatcttcactgaaacaaacagttgagtttggccaactttctcgtaaagccttagaaagtggtaaaatggttgaggctgattttgatattgaatttacaggttgtgattttactaattttggtatagatgccactagtggtaagcccgttccggttaaatcaatggaacttgtctttactggacaaaattatgctgatacagcaaatacattattggctacttctgctggtaatacaaataacttgggaattttaattgatggttttgagtttggaaaagcaaaagatgttttaccaagtattacaaatctaaagggtgataatgtattaacctttaaagctcttgctaaagctgttgatgcaagtaaagatgtttctgaaggtaaatttagtgcaatttctaatttccgtataacttatcagtaatatgaattaaattgactgttagtaaatataaatgctggcagtcaattttatctcttgaataagaattttttaatttattatttttcatattaatttcgttggttttattttatatatcaatgggtttttattaacttagaaataaaccagctaaagctgaagattctatttatataatggagaagaaagtggctatttatcgacgtataggattgcaagtaattagcagtcttttgtcacttatttctagtacagcattggctttcgatcctaaagttattgagcatgaaggaagtacttatctagtgggtagtgttatctcaactccttgttctattgtaatgtcaaatcgttatcaaacggttgatttttcttctttaactttagctatgttatcaagcaaagaaaaacgcgaacagcagactttaccatttgaaatagaacttcgtgactgtggcagcatttacacgtcaattgacagcaaaacatggatgatacgttttgatggacagagcgtaagtaatatcaatgcatttatcttgcaaggcacatctaaaggtttaggggtttctgttctagataataataaaaatgcattaataccaggagaaacatatcctttattcgatagcgtattacgacaagataaatcgggacaaatcctctatctgcgttacttccttaggctagaactcaccggagaacctttacgagctggagattaccaaggactggttcgtttttttatccattatcaataaaggtagatgcattttcttaggctctaatgaataaagtattttattacctctaggatggggatggtgaatagtatgatatttgaactcaatcagttaaggcaagtcgtattattgacaatgagtattagtgtgttttctgcttatgctacagaattcaatatcgatgtgttagatgcagaagatatacaaaatatcgatatgagccaattttccattgctggctatgttccccctggtgattatgtattaacagtttttgttaatggacaacgtttaggcgcacctcgcgatatcacggttttagagcaaaaaacgcaaacacaagctatctgtatacctgctgacttacttgattctattggtttaaaagagtctgtaaaaccaaaagtgactgtataccctaatagtcaatgccttgatctttctgttttgaaaggaatgcaaacagttattgatctcccaacactatcactcaaaataacgatcccccaattatggatggaatatagagatccttattggactcctcctgcattatgggaagaaggaattaatggtgctttccttgattacagcgctaatgtttcaatcaccgaagaaaaagagggggataaacgtacttatttgtccactaatggtactgcgggtattaatttaggtgtttggcgctttcgtggtgattatagtgccatctatcaaaaaaagcggggtggcagacaatcacaagaaatacacgattttgattttagccgtctttatggttttacctccttgaaaaaattggcttcaattttaactattggagaaaattatttttactcagatgtttttgaatcatggcaatacagcggtatttcattagaaagtgatgatcgcatgctacctcccaaattagtggggtatgcaccagagatcacaggtgtagcagataccaatgcaacagtgattgttcgtagccaaaatcgagtgctccttgaaacaacagtaccccctggaccatttcgtattcaaactttagatagtggtgttcgagggatactcgatatcacaatccgtgaagaaaatggagaagagaaaaaatttagtatcagtactgcctcattaccttatttaactcgccctggccgtctgatctataaattagtgatgggtaaaactcgttatgatggacatcatttaacaggtaaacccgtattcagtggtgaattctcctatggtctatctaatgcttggtcgttatatgggggaacacaatttaacagcgattatcaggcaacggcgattggtataggacgggatctattttcttttggggcattatcacttgatattactcagtcttttgcacgttttactgataaaaaaataaaagggcgttcttatcgtcttaattatgcaaaatcttttgatgcactacgcacggatattacttttgctgggtatcgatttgctgctagagattatcgcacattaactcagtttatggatcaacgtcgtactggttatgatattcgctctccaaaagagaactatcaaatttatataaacaagtattttgataattttaatatatcactaaattatcaatatagtacctattggcaagataaacctcaaacacaatatggtttatacgcaagtactaatatcagtattccaatgttatctcagcaaaatgcgaatatatctttatcagcaaccagaactgaacgagatagtggttatcaagatgatgctattaatctgtatttaacaataccattatataaaggccatagcatttcattttctgaatcatattctcgtattggtaaaagtaatcaatatagccatagagcaagttatagtggttatagtgatcgcgataattatagtctgaatgtgggctatagtcatggagaagaaattgatagccaatcaagtatcagtggttattattctcgcgacttttctcaagctaacttatctgctaacgcaagttatgtaccacaacaatatcgtagtgttggtgcatcaattaacagtggtattacagctacaactcaaggtattgcgttgcatcgttcagctaatggtgatactcgtttaatgattgaaacaccaggggttggtgatgtacctctagatagtggcgttatcaaaactaatcactttggacttgcagttattcctaatgttaatagttatcgtaaatctacggtttctattaataccagtcagctacctgaaaatatagaaacgctagaatcaacaactgatattaccttgactaaaggggcgatagggtatcgcagtttatcagtaatgaaaggggaaaagttgtttgccattatatccctaaatgatggtaagaaaccgccttttggggcaagtgtacgtaatgcggataatcgtgagttgggtattgttggtgaagatggtgtgacatggctagtaggcatttcatcaaaagaaaaactatctgtttattgggcagggaaaaaacaatgtgagttgtcacttcctgaagatttagcatcgccaactagcatgttattgctaccttgctcttcacctactatatcaaaaattacagaaaattaattattaattaaatgttttatattgtgaggttagttatgtttaattttagtcgtgggttatattgtattcttgttgggtattccatatttatttcgatggcggcacatagtgctgtgacattagatagaacgcgtattattttccctggaacggaaaagtcaattaatattactatttctaatgataatcctgaagaagcttatctcgcacaaagttggatagaagatttgcaggggaataaattaactaaaggtgctattttagcaacgcctccattacagagaatcgagccaaatagttatagtttagttaggttaagtacaacaccagaattacataaattaccacaagatagagagtcggtattttattttaatttacgtgaagtaccaccgaaatcaacagatggcaatacattacaaattgctttgcaatctcgtgtaaaactattttatcgtccaaatagtattttatctgaagcagaaactaaatggacacataaagtgacattaaccaaaacggctcaaggctaccgagttaataatataacgccttttaatttaacaataattggatttggaaatagtaaagcagccgctgaaaaaaatccttttgatgttgtcatggtgccacctaaatcgactcatgatattgcgtcttctatattatctacaccttatcttacttatattaatgattatggtggtaaaccatcgttggtatttcgttgccaaggtgatacctgtgtggtaactggtgaacaataattcttaacaatattggaatataggaaaagtaatgagtaaatatcacgtttttaaaatagccaaatggttcaaagtgcttttactcattgttggctgtgcattcagtcaatttattatagccgaaagttctatcgtgagtactacgacaaaacaatcagtttatgagccattacatcaaggagtagttcaagtgagagccactctgtttaatgcgccttgtaatttatcttttgataataatttaagtttgattggatgtggagctggaaaagattatcgcaccataaacttatttgatgtaacagcaaatactcctgcaagtattcgttattatgatatacaacgaaggctattttctgaagattattcactttcattacacaatggcaataatccaatatatttacccaccttaatgaaagatcaacatatattacgtttagaggtaagttatgaataagatggtgaaatttctagggcttatttctttaacaatatgtaattggcagtctcaagcattagcggccaataatttagatgttgaatttagcggtgagttaatcagtgttgcatgccaagtcgcttcagaatcaataaataaaaaagttactttacacaatctacgttggcaatttattaatgaaaatgaaattagtaaagtgactcatttcacgattgcgattgataagtgtagtgaaactgacttacagaaaagtattaaattaacctggaaaagtaacgaattagttgatatcgatggtaatcattttcttattactaaaggggatagtggagcactattaggaattattgataataatggaaggtctgttatatggaataaaccgatgacaattggagatgtaagtgttgttgatggttcacaacaatttgagtttggtgtttttgtccgtaagccagcaataggagaaattaagattggtgaattttccagtatcgtaacttttaatgtggagtatgaatagtgctaatatggctaaataaaatgaaaaatttattgggtgtagctttattatttatttctctagtatgtaatgctgatatttttattaatatatctgcaacaatggttgaacctgtttgtaatatacgtagtgaaaatggtagtgctccattaaaaattggttttgatacattgacgatatcttcactgactaaatctcctgtggtaaaagatttttcactttatatatcagactgtaattttaataatacattagccattgttttaaacccaaaaggaggaagtacgcttttatataaaggaaaaaatatattagcaacaagtactgatgggttaggtatagatattaatgaagtgactggtggaactattcgttcactggaaacaagtaaaaagcataaaatcaatccagaacgaattaattcaactctttatcgtgttgacttacaagctcagttagtaaatacagtgcctattaatcaattaaaactagggaagttcaattcaatagttactatttcagtgacttataactaatggatattttttatgttgaaactaatacataaattttcctcgtggaaaaaagaaatagcattaaataatgtaataatacctttattaaatgacctaatttatttcttaatattattaagtgttttttttattaattttatatttacatctattgctattgcagattatgcgccaagaattcaagatataaacactggctatatgattaaattggcaagtaacagtcctattgcattaaatccagtgaaaggtacagatggtaaaaactattataaagttggtaatacgattgtgatcaataatacaccatctagtgtaagtgtatcggggattgttcagtgcatcgggcttacttggggacatgcttcaacaaatatttcttggaataatgcatatcatcgcttgtttacatatgtacctatggctggtaccaatatagaaggccatatggcatatcgtattaatagtaatttggtaatgaccattgatactcaaatgttgaattgggtaaatataagaggatctgtttgtgaacaggctacaccaacattaactgctcatgccagtgaatttactgtacaatttccaatcagtgtgacattttatataaatgatatggttattgattctcagctacctatacctgaaatggatctaggaggttatgttcgtgcatttacacgatcaggaacgagtcctcctcaaaattcttgggcattgaatgatgtcactgttcctatgcgattagcagcatcacaattaaacgtaacttcttcttgtaaaacagtaacaagtacaggacaagtaagtactttaaatttaaagcatgggcaactcaatacattaaattatgacagcttagttacagaaagtgtaacttataattgtgttttttcaaaagcaacaaaagtgagattacgtctcgattatataactgataacgatcctcaaaaaagattaccgatggtgagtacccaaaacagcaataataaaatttatagtgaattgaccatgacagatgaaataaccgggcaaaaaggtaaagattttaaaattgacattaatgatttgagaacaattaagataaccagccatcttcaaggaacaaatgcgatagctggagattataaaggttcagcttggctaatcgctacgtttgattgatatatttatctaaataaggcctatttattattagataagtagagccttttttacattttttagaaattaacttaataataaatctttattgataagttgtttcttttttttaaaaaaattagttagtaaaagtatttttattaaatagaatgggatattctgacgcttgataatgaataccaaacacctgcgccataaaaatagagataaatatatctagtggctgattagagcaggttagttttgcttgcattattgctccttgccaacccatccagaaaaaaatagccatttgtctacaatcaatgtttttagatataaacttatatttttgtgcttctagaagataattttctacctttttctgccatccagaaatcacattattcagtattttataatagttaatgggtaaattaacaatatcttgtatgagattacttactaagcatcctcgttgccaatgatacttttccatttctgattttatcatgtgacaaaatgctaatagtcttttggggaaaggtaatgcagtataagacaaatagttatctagttgcttagaaataaagttgtcataatgttggatgacgactaaaccaaatttttctttactaccaaagtaataataaaatgatcctttcgggataccaactttttctaatatcttacaaatgtctgaactgatatagcctttttcagcaaacatttctataccactttgaataactatattttttacatctgtattaggactatgatttttggggggacgtcctcgtttcagtttggtgatttctgatatcatcattttgctatctccacgacaggggagcatacaggtagcttattgagtacctgtcaatgctgattattttgttgtgagaaaagtccctcccgctgaaattttatgcgggaggaatataacgaatagcgtgtgttattttgtcattaggtcttggttttgtttcatttcaaatcgtggggagacaaaaccatatagtgtccatcccaagaatgtggctaatgccccccacattacagcgtcttcaccagatgaatacagagcatagaaactataaatggccccaatgaatgcgatgatattactggttctcgctttatgaggttccactttggcgactttttgtaaaataatcattgccgccatagaaaggatgtaaggaataatattagtcacaactgctagattgacgagtacattaaactgtttatttaatgatgggctgatggtcatcagtgacagtgcagattgaataacaacaataactaacattccttttactggggcgtcagctttgctaactgcagaaaatatttttggaaaataaccagaatccgatgacgccttaaatacttgtgcgatggtgaactgccagccaagtaaagatccacaacaagacataatcattagcgccataatgattttcccaacacctggggtaaacatttgggagaaggctaagccaaatggcgcggtagagtttgccagatccatatttggcacaatacctgcgataacatttgttgatacgatataaataacggctgcacctaatgtgccacctaatacagcaataggaacattcttttcaggattttcaactgcttcactattggcacaagctgattccatacctaaaaatgcccataaggtcatggcaatagaagagcctacggcttcaaagaatggaaaattatgtggattccaagagttaatgtattgttcaggattgaaccaccaccagccaataattgaaatacccacaacagggatgatcaccccccagacagtgatgctgcttatttgtccggtgatccgcgcaccaccaaaatttgctattgtgcagatccacaatacaacaatcgttgcaatacaaatacctaacggagtcattgtcgcatccatcagttcggcaccataacccacagcagaaattgcgatagcgacattggcaattaacagggaaataccataggtataattggccataaaattccccgatttgccaaaggcatactcggcataccctcccattcctccgctacgacggctaaacataccgcatttagcaaatgcataggccagagccatagagccgactgcagtgacaatccaagataaaatagaaatggttcctacttcggctagtttggtcggtagcataataataccggaacccatcatattcaccgcagttaatatagtgagttgcaatacactcattttattttttgaagtactcatcgttttactctccggctgacggagcatgcttattcacactccgtcacgcataaattaattaactcagtgcttaattacatagccatatgcccgcagacgaccgtcctcatcattgcggatatatacaccttgtaattccggtgagaatcccgggaatagattaattccttcttctagcgctagaaaatattgctgtacagagccaccccaaatttcccctggcactacacacagtactcctggtggataaggtagagcaccttcggcggcgatacggccttcaattttttccacggcaactaactccacctcgccacgcacaaaagcgatattggcttcttgaggtaacatactgacttgtgggaaatgtgatttacggaacatctctttttgcagttgttttacattaaatttcacatacatatcatgcatttcttggcacaattgacggatggtgtatccttgataacgtgtttggttggcatgatatactgatggaagtacctctttcagtggggcatcttgttccagtaattgttcaaagcgagcaatttgtgcgaccagatgctgcattttcgccatgctttctgcaggcgttagcaggaataatatggagttaagatcgcatttttcaggaataatgttattttcacgtagatagttcgccaaaatggtggcaggaacaccaaatgattcatattttcctgttttggcattaatacctggggtggttagtagtaatttacatggatcaacaaagtattgattttcttcatatccctcaaatgagtgccagcgctctcccggaacaaaattaaagaatcggagatcattggcaatttcatcagtatcaaaatcttcccatgcacggccatcgatagtttctggaataaacgggcgaatatgtttacaggattgcaggagtaatttacgggtttcaatccctgtttttacgcaattcatccataaacgtttacctgactcaccttcatgcattttggcattcacatccaaagctgcaaataatgggtagaatggactagttgaggcatgcatcataaaggcgttattgagacgtttatgatttacatagcgtttttgacctttaatatggcgatcttttttgtggatctgtgaggtttgagagaatcccgcttgttgtttatgtacagattgtgtaactaagatccccggatcgttttcattcagttcaagtagaagtggagaacaatctttcatcattggaataaactgttcatagcccacccacgcggagtcaaataaaatgtagtcacataaatgtccgattttatcgactacctgacgtgcgttatatattgttccgtcataggtacctaattggataacggctaggcggaaagggcgcttttcatttgcacgtgtaggggcgacttctttgatgagttcacgaagatatttttcttcaaaacagtgagcatcaatcccaccgataaacccaaatgggttacgtgcagcttcaagataaacaggcgttgctcctgcttgaattaatgctccgtgatggtttgatttatgattattacgatcaaataatactaggtcatctggtgccaataaggcattaagaacgactttattggaggaagatgtaccattaagtacgaaataagttttatcggcattaaagacttttgctgcatgttgttgtgcggcacatggggcaccttcgtggatcagcagatcacccatagaaacatcggcattacataaatcagagcggaataagttttcaccaaaatactcgacaaattggttacctagaggatgacggcggaaaaattcacctccttgatgcccaggacaatcaaaagctgaatttccttgttcaacgtatttttttaagctgccgaaaaaaggaggtaatagactctcttcatattttaacgctgcagtttctagttgtttattatataactcactattttttttatttaaatcaattacaccagttaatcgattaataatattagcagggataacttcatctttattaataatggcaaaaataggctgttcaaagctattttgttcaattaaattaagctttccattctgaatgtcattaagtgaaataacaatcacggcaacatcagaaaaatcagtatgtagaatatcgacacattcacggtgggttgaaatatagtcagacatatcgtagctgaccgctattttataacttttcatttttaatacctttttttggtaaaaaattctcgctgaaatattaagtaaaaatatttcagttttttatttttataaatgcgagttttttccctcgatagagtgtcgagttataaaaatcacgtttatatttatgtcatcacgtataaaaataatgtatagaatgatggtttttataattttagtaatatgtttttagccaaattaccaataataagaactaattaactgcacattactatgcataaaaaccaggaatatgaatgatcaataagaatccattatagtcacataaaatgtgatttataatggtaaagaggttgactatccatacgctggtaatatgcaaaccacgtgatggatgccaatagagagattatctttgagcgttgaaaagattaaaatcaaaacatgaacgatgtgaaaacatcattatatgtgtaatacgtcttatatgtggccaaaatcgattattattttccattttcgcatccgttaattattaagacctatataacaactataaattaatataattaaatacccgaattatactgtgatatagatcaaaatatatcattttaagaatagttttgtctttaattaatatgttgcttgttaattatttgttgttttgtttttaataagagaacttataattaatatagtcgctaagtctatattataaatagcaatataataaatataaaatattttcattatgaatgtatagggttggttgtttgtataaatataataaatattttttattttgattataaatatagtgtatgttccctttattaaattattcgtgtagtcataaaacactttaagacgtttttatcaggtgcgtcgtaaaacccatctttcaggggcgcgatataaggtgtggttttccggctaactcagtttcttttgtcatagaccaaagtacaatgatatccatataacaactttaagccttcaaattccaattaatatcaaatggtcagtaggagggtaatatgcggtgcttcgcaggagcttgtcactttattttcaattgtgcgttagcgctttagaatgaggttctgatattgagacttgagaagacaagcagtacagttagtactgcttgtagtcatagtagaaaagaagtgacctttattactccaaaaggaaaaaggattagagcatcacagaatgaagtttttgatactttattgaaatcaataaaataaatatttattggatgcagaaagagagagtttaggctctcttctgtatatttatggcgtaactagtctgttttttattacaaaattagtttctgattacttactcttttaatagggctagctattttgtaatagtagagagtattaagaagtatttataaagggtgtgataaatagtcgtaacgaaatttgaaaggaagaatgctttgttaatttttcacataagattaaaaagtaaaaggagaacctaagttctccttttgatatttctctacgacaacaatatgtgttgaaggattagccgctgcctaatcgactgatacttgctctttacaagctgacctcagtcaggtgcttacgcgggtctcatctggattttaagagcggggagactcaagcacactctataacgcctttatacccgtttatcttgatattatcaagtttttttgttttgtttttttattgaactgaataggcagatagcatgtataatggcatttggatactgttgtgcaatgatatccctagctgtagttaatgttgttcctgtagccataagatcatcgacaagtaatattctgattttttcagtattggatgatgcttgtgtgtttaaaacaaatggtggaaatatattcctaaattcagtagggatactttttagtgaaaaccctcctttaagtccaacttcttttgcttgtaatttaattttgaaactaagacttttagcctcttcaatattaatatctgctttatcgagaagttgaaaagcattatcgactgttatttttcttaaaatatcagttaaatatgtggcattaaatttttttgctaaacgttttgcgataatagggctaatattatgggctgaaggcattgatattattagttgataccctttaggttctaattccataagtttattgcaaatgattttgaagctatcattgagtttttttatgctagaaatatttgtatataaatcatccttttttttcaaagcataaattaaaggacaattatcccccagttgacgttgttttctattacgtcttcttttacctgaaaggaattgtcttttaaaaatagcataaacttttaagccatctgtataatcaatagttggattcccttcagactgagttattagccagtcggggcaattatgatcaacaataacacattgctcttgaattattaatcccataaatacatatgctagtccgagaagagaaggaaagtataacagagagaaaatagcagagctatattaaaataaggcaatgtattatttagaatatataattacattaataatttaatttattaagttatttaatataataattgttaatcgaagtccagactttcatagtgtgtcttttttatcataatatttcggacacttaaaaataatatgaaaagagtgtctatttattcgatattttcaattaatagacacttgttgtctgataatgacttaggagacatattttgcgcctatttggttatgcaagggtatctactagccagcaatctctcgatactcaaaagaaagcattgattgatgccggagtggcaaagcatcgcttatttagcgataaaggatcaggaagtcacattaatcgtgatggattgcagttactcaaaattaaagttgaatgcggtgatattattcttgtgaaaaaactcgaccgtctcggacgagatactgcggatatgattcagttgataaaagaattcgattcaatgggtgtagctgttcgatttttggatgatggtataagtacagaaggaacaatgggaaaaatggtggtcaccattttatccgcggtggcagaagcagaaagacaaagaattttggaacgaacaatgagggcaggcaagaagctttgctcaaaggggtaaaatttggacgcaagcgttcagtggatcgcgaaagaattattgagctaaaacgaagtgggtggggaggaaccgcaatagccaaagaaatgaaagtagctcgttctacggtttataaaatcttgaatgaagaaatataaatgtagtgtatgagcagtgacatagcagtaatgtaaaagcaaactaatagactgcaatgtgccagtagaaaacgttgctaattacgttgtgtattaaaaaatgagaaaaacgatcatgcttagtacaaaaagcacgaaagaccaaaataaaggaatatgtatgaagtgatttagtatattggataatattttgggtgtggttgctttaggtgaaaaataaaaaatcgagaaaatttagctagtgccaaagtaatttggacaccgccagtcatcagacccactaccacacttatcatccctgcccatacggtttcaataaaacaagatgcatatagtactatatggcggaataatttactcataagcttttccttgctgacgtaatcgttaagtaacacgttgaagtaacgggtaaacacaattattaggagagctgtgatgaggaatgtaggcataggaattgaatctatggatgcactagctaaattcactcataatgaactgtacagcattggatgggagttgtaaataagtgtacctcaagagtcaatttttagattttataaccgatagaataacaaattttaggtatatactaatgactgttatgaggtgatattttaacttcccaagcatacaggaagagcttagaagagtttatattcgataaattaataaccacgctgaatcaaaaaatctaaaagttcatatagaggaaatttgttttgttatacaaagaaatctctaaaaagaaaaacaaaaaagttaacgatgatgctatcaaaacttaaagaaagaattatttcagcgttttcataagactaagaaaaaagcagagcgagatagtcagtttgtaatgaaataactttaatttacaaaaaaaaggttctttggtaaatagaaccttttaggttggtaataataagttattttttattcattattactttaaatatataaaaatatttttctactaactaatttttcaaaatattattgatagcctttattgttacaataagttctaaatgcagagccgtttattaatccaaggtataatatttgttcccaatgatttgccccaaaaataagtctactcttattaactgcaactagagcagagtttagtgcagaagaaagaagtatatcaaagctctctatgtttgaaattatgatattttcaaattgtgctattttttcatttgattttgatttaaatctatttaacaaatcaagattgatataatgtctttcaattagcatgaaaatatcttcattaatgttattttcatttcttaattcaaagttaacattgaaagtattaccaattaaattaatgtttgcaaaaagatattgtaaattgggtaggtcatgtgaatataagtttataaactcaaagttattattattatctaaccatttatttgattttttgctgttgcattgactacaagctggaaataaatttttaggatgtactgcatattcaggataattttctttaggaataatatgatctaatgtatttacgctatttaaagtgcaatactgacaagtatccatatctctaccatttggtaattttaataattgattcttaaaatttgcaaatggttttgaactataattatatagtttgagtaaatcttttttttctaaatctgaaaaaataagcgattgttgaataagatttaaagtattattatcaaaagatgtatcataattttgataataggtatttaatgaattaaataaattagatattctatctttataatctcctctattttttgagttaataattgaacgtaaaaaagagatactagaatcagaatatggagttaagttaatcattatttttgatctccatgttttgtaataaaatggaaagatttaaactaagaggaactccatcagattgaatggattttctaatatcatcaatactatatccaattttaatttgatcttctattttttttctaaaatattgtggtgtatctctcgcaccgaaaatatcatcagtaatttttgacaagttttcaccaaatgtttccagcgatggatgtgttacacttaatactttattttcattttttatgacaaaaatatttttagataaaatcccttgaacaataattggagaatggggtgctattatacagtaagatttaaattgatcagcaagagagtgaatgctattaattaactgagatatggcattagggtgtaagtgtgtttctggttcatcaaaaattattaatgagtcatatcttatattagcaataatttcagtcataatatataagaaaatagcttgccctgagcttaattttttttattgatttttctaattcaatacgattaatttcatagtcaatactattggttgatgaatttgaaacggtttttatccaagtagctattaattcaggtgtgaaaaactcactattaatatgcatccaacttattaacctatctttgtatataatatttttcatggacttgaagaaacgagtttttaactcttcttctgatatataactttctttgtttttattttttttcttaatccacaatagatgtaatttattttagatgaattttcaggaatagaaaatttatcaaatatactgtatgaaacggctattatcttactaaatagtggaactttacctgagaataaatttttattatcattggcgatatcacaaggtaattttgataccaattgtgtctttcctacaccattattaccaatcaatgcatatactctattttttaaaatagacttatcattaaagttaaaagttaaaagttaaaagttaaaagttaaaagttaaaagttaaaagttaaaagttaaaagttaaaagttaactttaatttatcttcatcatcaatgtaatcaggtttaaatatatattcgaaggaataaagttgacttaaatcgtattttcttattcgatgcctagcctgtcttaataactgctcttgttcgtcatatcgaattaaactatctttaaattgagataaatgttcaaatgactcttgtattttagtaaagaaagctacatcatttagtgcttttagtattgataatgcattacctttaaatatattctcataatattcaaatttttgacctagagaacaatgtttattatctaatttaaaaaaattattttttatctcatttgttgtacttatatcttctttagagattatttttaagtctccaatgatgtattctttttgatttttataataagacaatagaaatttattatatcttccgaaatcattccagttaatttctattaatttaaaatattcgttttctttatttttattgttttttattataaagggaatgttgttattttttatatctttaaattcatcatcattattaaaattagatagttcataaattggtatattattttcatcgtgtccatttaattgatactctatgttatatataattaaaattggatttaacttgttatagatgtaagaaatttcattcacacctattttcattatggatggagataccagtgtgttgagtaatagggtaaataattcgtctgattttaaaaagtcaaatctttcaaggaggatatactctagagtccaatcattattattaatgtagtgttgatttaaatctccatatgcatcttgataacgaggatcttcagaagctaaaatccttaagtttaaaatagaatcaaaaaattccaagggggaaatgtttttaaataactcagattccattgtcgccaaagtattaataatttctaatttgcattttttatcaataggtatagtaaacattttatcactttatgtaatgaattttttgtatagtaatataatcattgtgaatgataaaagtagtgttatttatttttattatatgtgcgaaatttttttaaaaaaaagttgaaataaattatttttaattatatgtataaaattaatatcattcaataatgacacttaatcagactatttttataaacacttcctcattgccccttaaccaacaatccatcaaagttggactctttgtaacagagagtccttatgaacaaacctatttcctttataatctgtttcactaccttatttataacggcttgtactccgaaagaaaaacttcagcaacttgaaactgaacctcgctcgatcattctcaataaaaacattcaaatagcacagcccgatctctatctaacaacaccaaaagttgtgcgttatgatcgctatctattgataaatacatctccaacgttggctcaaagtgacccgatcgaacaaataattgatgttcatatcccaacttctcaacaatcctctgttagtgatgcaatgcgttatattttacaaccgtcgggatattctttatgtaagacaacgtcgtctaatcaagtactctataaccaaaaacttcctgttgtacatcatcaattagggcctatgcgcttaaagcaggctttgcaagtattggcaggtgttgcatggcaacttgagattgatgcagtacaacgaataatttgtcattcattgcgagaaggttaccaattaccgacagaaatactcacaaactcaacattatcagcggataggatgttgcaatgaaaattcaatctatattgaattctcaatttttagtctcattggggattagcgtgttgacattgtcaacagaaggaatggcggatcaaagtcaacatcaagttttaaaaacagagcaacaggcattagaacaatcactaatcgctgaaaatgctcaagaatggaaattaacagagaaagaatggcaacgttatgaaatgctaaaaaaggggaaacgagggctgttttcaccgaatttagatcccttaactttattaggtattgaagctcgtacttatgaggagcgacgttattttgctgaattagtggtgaggcaagaatttcagcgtgttgaagcagaattagcctttcagcgagaggcgaatcaagcatggcttcgtctttatcctgaaattttaccaattcaaaatgaaatgagagaaagtcgtcaggctttatttgtaaaagaaagttgttctatttgtgaggtaaaactcgctcagcttatcaaactaaatcaacctattgatatctatttagtgggaagtggggggaaagatgatgtgatacgaaattgggctaaaaaacatcatattcctatcgaaaaggtaaaaaatcgccatatcacattaaaccatgataacgggatatggctaaagcatggcaatggaataatgcctgttgttttacaacaaggaacgcaaggatggcaaagagtcgattagtttttttatttatctccattgtttatcttggtgataatagtcgccgttgttgatggtttggtcagacgtgatttacgtcgatatggtgcagcttatgaatctagttttgtttatcatcatgctaagcgaataatcaagcccgcaatttatatcctctgtgtattgtatttatcattgccatttgcagtttatccgaatttcttgttgttgccttctatctttttgatagggatagctatttctgtgacaatagggtgttttaaaaagtatttgtagggattattcctttttattaattaagattaagattaagatgcgatggagttgctgatgcctgagttaacaatacgagagtgtggtgaggaggcaattagattaactaatgagttatttcaacagtctgagcaatcttttatggcatatttattaaatgaatcagacttagcatggtgtattgcaagtactagaaattttccgccagagaggcaacttccttgggatcacgcaggacaaacatttcaaaatgataatggatttagcttttgttttaagtttttagatatgcaaaataggcctgctggagcctgcatttgtgaatattgctctgataatgtattgaatattgaaatgattcagaactttcaaattaaaccatctattcttgatggaaatacgcttaagtttatgctttataccatagtgttttttctgttactgacacaagggacgggtgtacggctcatgtttcctataaatgaaaatgttgcaacatactatgttgaaaaacatggttttcaggatttaactggtgatggttcaaaagaaatactttaccgctcagcagaagatttattaaattggtttgagcaaaataaccgctcagttgatagtgagtgatttatgagcgatactataatgcaatcaacatggcaaactaaggagttgggtatggtaaccagaaaaggaaaatctgttacgcctgagtcttcgtttttccaaacgccacacattattcagactcgagaagatggaagtactgttagtactgtttgtagtcgtagtggaaaagaagtgacctttgttactccaaaaggaaaaaggatcagagcatcacagaatgaagtttttaatactttattgaaatctataaaatcagtaaatcattcataaaataaatagttattggatacagaaaaagagagtttagactctctttttgcatatctatggtgtagctagtggttttaattacaaaattaatttctgattactcaagctcttgatattttcttacggcaacaatgtgtgttgaaggattagcgactgcctaattgatctgctttaatcaaacaagacactttaataatggaatataatttaactattgaagtgttgaatgaaaaaacgaacaaaccgagtttatactcttgagtttaagcaagaagcggtcgcattagtctcaaaacaaggttatagcgtctcaaaagcggcagcttctttagggatcaccgataaattactttataactggaaagcaaaattcgacgctgagcaatccggtagtagcttgaattccgatgagagagctgaactattaaggtttcgaaaagaaaataaagaacttaggatggagaaagaaatcctaaaaaaagcagcgccctccagctaaaggaaaccaagtaacgtttaaaacgattaagcaattaccttctcagtttcccgtgcagaagctctgtaagttaatgaaaataagtcgttctgcctactacgcttggcttaaacgcccagcaaaattgatcaccgcagaaccaaagctatctttgaacagagtcgaaatagcttaggttacataacgtgacataaacggttatgcaaagagggctttagcgtgagtgcttatggcgttcaaaagctaatggctcagcttggcctagtcgtcactcagcgtgttgcttacaaagtcaccacaaaacgcaaacacagtgatgcggtagtcgataatttgttaaatcaaaatgttaatcctcacgcacctaacgaagtgcgggcgggtgatgtgacctatttaaaaacaggggagggctgggtgtatttagtcatcgtgatggacttatactcacgccgtattgcgggttgacacatcgataaacgaatgacggcagatttagttgtgcagaacaattagggcatgccagtattacatcgacattagaatacattgatgaaagtgttgataacttgcgagatatacttgaagcggaattgatgtgataagaataacaagaggagtatctagatttgacagtgattaggaaagaaagtaaaagtgacaaataaaaaaaacagccttgatatgagcaagactgtttagtttaagagttttaacataaagtgactgtgccaaattatattatttttcaactcttgtttgccctctcagtgatttaactcactgacgaacaaaagaaatatggtgcccggactcggaatcgaaccaaggacacggggattttcaatcccctgctctaccgactgagctatccgggcaacggggcgtattaaacccgatctcaccgtcttcgtcaacgttatttatcacaaaactgttcaatcgctgtttttttaatcttattgattaataaaagactctttttttcacagaatgagtaaaaagagtactgaagtgatttttgttgtcgcagagcaataaagaaaaaatgtagcgaagtgaacaaaagcagggtaccgataacaaaaaagcttacccaaattgattgggtaagctttatttttaaacataataatggttaacgatagttacgttgcgcggtgcttaccttttcaagataacgccgtgattggtcggccggatgtttattgcgcaatgtcgtataaacttccgtcggcgctaagttattaatcatcgcggctgcttttttcttatcactatggaagatgcgtaacacactacccgcaccgccattgtaagcctgtatcaccgcatagcgacgagaaacgggatctttaatgtcacctaagtagctattttgtaatatcgagatatacgctgtaccaacatcgatattattcgccggatcaaataagtaactgcgacttggctgtcctgatttaccttgcatacgaaatacatctcgtccggctgttgctggcataatttgcattaagcctagtgcatctgagctacttaccgcataggggttgaagctggattcaatttgcataatggcaaggatcagggaaggttcaacaccatacttggccgcggcttgttgtacataaggtaagtatttatgtgcacgtttatctaagtggttaggtactaagttaatagtgacataccaaatagtgttcagccctgattgacgtttttgtaatttattggcaattagataatctgcaaatttatttgctcgccactcccagcgtataggctgccctgtattatcaagtacttgtcctaataaaaaaggctctgtactgtggggaatattatttacatcagagtagaggtcgatagagccgggatcttctcccataagcaatgtcgtgacaatcgctttatgtaattggaattgaggcgcgtcaccccctagggtttcaatagtgatagtacccgcttcaaaattaatatggctacgagttctataagcgtccgtatattttacgtagtctttagggcctgcgattaatacttcctgcattccccaaatcatctcgatattattggcaaattgtcccattaatatatcgaaggcattggtgtctttgctgtaatcaggctcaaaagttttagtgggtttactactacatgagatgagtagaggggcgataatcagcaagagaaggatttttttcatggtctattgcatcgctctggtgaataaaactccagagccgtaatggctctggaaaatggatattatttttcaggtggtgtgtagccgtcaatatgaacatcgtggccttcaaataaaaatcttaccatctcttgttctaataatttgcgatcgtcaggattcattgtgttgagttttttctcattgataagcatggtttgctttgccatccattgaccccaagcttctttagaaatctcattgaaaatgcgttttccaagctctcctggatataactgaaaatcaagtccatccgcttctttatttaggaaagtacaaaaaatagttctactcataataaatcctcaaatatcgccggtattagcttaggctaattgtctaagtaaattctctacaggtgccgcaagccctacgcttgccggggtttgtaagttataccaaagtccttgttgcgcctccatcagagaggtaaacgtggagagttttacgcaaattggtactatatctaaatgaaaatggctaaaagtatgtctaaatgaaattaattgctcagttttgttattttcaagaccatgttcagctagccactgttctaaaagcatttttgtttcaaactgaggaaaggagaacagtcctccccatattcctgctggtggtcttttatctaaccagaccagattatcatattgtaaaataagaaaataagttgttttttccggaatagcctttttaggttttttccccggataatccgcccaactatggtgagcataagcaatacaacctgtatttaaagggcaaagttcgcattttggttttgttcgcgtacaaaccattgcccctaaatccatcattgcttgattaaaatattcaacccctttggttggggtgacttgttcactgatttcccataatttattttcaacttcttttttacccggccaaccttctacagcataacaacgcgctaaaacacgttttacattgccatcaagaatagggtaaggcttttttagtgatagcgataaaatagcccctgctgtagagcgtcccacacccggtaaagcacaaacgtcctcaaaggtatcaggaaactgtccttgatgcttatctacaatgtgttgtgccgccttatgtaagtttctggcgcgggcgtaataacctaaacccgtccataaatgtagcacctcatcaagtggcgctttcgctaatgcgctaacattcggaaaacgcgcaataaaacgctcaaaataagggatcaccgtggcaacttgcgtttgttgtaacatcacctcagataaccaaacgtgataaggcgttttttcttgttgccaaggtaatgttttgcgcccgtatttgtgataccagtcgagtacgacttgcgagaactgctgtgcatccatcatattttatttttaactcagatctgtataagggtaagattgcaccacagagagcataaactgtaaacacccttaatatttatcttatagagtgatgcttatataggtgactcttgctaaaattggctatctttggataatgtcgcttaaatgtatactataacgacattataacgttattaagttaataattggcctaacgactgacagtattagacatgatcaagaatgtaatttctccggaattcaatgaagaagggcgtgctttacgacgcgttcgtagttttgttcgccgacaaggccgtttaactcctcgtcaggaacaagcattagaaaagcaatggcctatctttggcattgaatatcaaccggaacctatcgacttcagtcaggtttttggacgtaacgcccctgttgttttagaaattggttttggaatgggcgcttcgttggtgactatggcaaaaaattcgccagaaaataattactttggtattgaggtacatgcccctggtgtaggtgcttgccttgccagtgcacaagaagagaatatctcaaatctgcgagttatgtgtcatgatgcgatagaagtactcaatcacatgatcccagataatagtttacagatggttcagttgttttttcctgatccatggcacaaagcgcgtcataataaacgtcgtattgtgcaagtaccatttgcagagttaattttaactaaattagcgccaaacggtgttttccatatggcaacagattgggaaccctatgcagaacatatgcttgaagttatgacaagtgttgatggatatcagaacttatcagaaactcaggattatgtaccacgaccagaaacacgccccgtgactaagtttgaacaacgcggtcatcgtttagggcatggagtatgggatcttatgtttaagagggtaaaataatggctaaacaacgtagtcgccgtttacgcaaaaaaatgcgtatcgatgaatttcaggaattaggtttttcagttaaatggacgttcccagaaaatacccctattgaggaggtcgacagctttgttgatgactttatccttaatgtgatagagccaaatgggctggcatttgatgcgagtggttatctgagttgggaaggcctgatctgtctacaaaaaattggcaaatgtaccgaagagcatcgtcaattagtagaaaactacttaaaagaaaaaaatatgcaagatgtacagacctctgaactatttgacgtttggtgggactaataaaaagttatacatttttagcaaataatcacaagggcatccaacaggatgcccttgtctgtctagggaatcagctgtgactacaacgttatctaacgcattattgtcagatatattgcaacaaattcgtcctttaattgggcaaggaaaagtagcagattatattcctgctctcgctcaagtacctgctaatcaactggctatggccgtgtatacggttgatggtgagctttatcaagcgggtatggccgataaacgtttctctattcagtctatatcaaaagtacttagcttaacccttgcgttaacacgttatgatgaaagcgagatttggcaacgagtaggcaaagagccttcaggattaccttttaattcgttgatccagttagaaatggaaaaagggctaccacgtaatccttttatcaatgctggagcgatagtgattacggatatgttgcaatcgcgattaagtgcgccaaaacagagaatgttagaagttattcgtgcactgacgaatacagctgatatttgctataacaccgttgtggcaaaatcagagatggaacatttaagtcgtaatgctgccattgcctatctgatgaaatcgtttgataattttgataatgatgttatcaccgtattagaaacctattttcactattgctcgattgaaatgagttgtgtagagcttgttcgttgttttagctacttagcgaatcaaggaatatgtgttggaagtaaaaatcagattattacgccaagacaagcccgacaaataaatgcgttaatgttaacttgtggtatgtatgatggtgcgggagagtttgctttccgtatcggtattcccggtaagtctggggtgggaggcggtattattgctgtggttcctgatgcctttaccgtagcagtatggtcaccagagttggataaatctggtaactcattggcggggtgtgctgcccttgaattattagcaaacaaagtagggcgctcaatattttaagtggctgtagcgccaagaatgcgcaatgttaggtaaaaaaagtagttcaatacgcttctaggagagcgattatgggatttaaaaagttggtcgttgcattggtttttgtcgcaagttcagccactgctgcacccagttttgactgtgctgtcacgccaaaagatgatttacgtattacacctgaatttgttgaagtggccggctctaatggtttacttgttatttatcccgatggcacgttactgcgcgatgaaaagagcgtcacactaacccctgagcaacaagctattgcgaaaaaatatcaagcgacagttaggcaagatattccttggttaagaaaagagatgggaattaaattacaagagtcaagaaaagtactggataaagttgttattgaagcctttgggcaagatagccgtattttaaagcgcttaagtgacttagaaaaaaatcttaatcaacaaatggatactgttatttcgctcaagcctgataatgtcacattccatgctcaagcgattaaacaggtcgaaaccaaagggcgagaaataattgagagtagccttggggggatgttgcaagatagcattaatgaattaggtcaaaaacaattactagctgctgcgagtggtgataggaaaaaagccttaagtggattattaggtaatcttgatggttttcagcaaatcatcgaaaaagagtggaagcaacaagaagcttcatttaatcaatttgggcagcaggcatgtaataaaatcacccaaatggaaaaccaacgtgtcgaattgataaattcactaaacaaatagctttatccttacagtaaataagagttatagattgttgattcacaatagttgaaaataacaatgaaaatcattcttattcaattgacatgtaaagtaagctgtttagaatgccctgcttaagtattccacttaaacagggctaaattcatgaaaaagatccttgcgttagttactgcctctcttctgtcagttagcagtttttctgcattaagtaatacctcagttacataccagcctaatcaaattgttgaacagcaaaatgataaagttgttatcaagcacctattaggtgaaactgcagtatctaaaaatccgtctaaggttgtactgtttgattttggtctatatgactctttagttgcattaggtttagcggataaagtggttggtttaccattaggaaatgcacctgaatatattaaagggcgtattgcgaatgatgtggctaatgttgggggaatgaaagcccctgattttgagagactcgctgagcttaaacctgatttaattattattaccggtcgtcaaggcgcttcttatgagaaactcacaaacattgcccccacgattaatttaggtacaaatagtgcgaattatcttgattcagtggaagcgaatattcaattaataggtgaattatttgataagcaacaagctactcaaacacaattagcaacattgaataccgtgattgaacaggctcagaaaaaagcggcaggatcagataaaaaagtgttggtcttactgcacaatgcaggcaatttaatgcccaataaccaaagcgtgatttacgatgtggttaaagcgaagaaagcagaattaccacctgttgctgaagaagagaaaggcaaacgtcgcgtggttacttctgaaatgatcgccaaagtaaatccggatgttatttttattatcgatcgcagtgaagccattggtgccggtaaattagagaaaaacacctttgaaaatgatgaagtgaaaacaacttctgcttataaaaatggtggtattgtttatttgcaatctgatctttggtatctctctggtggtggattagaaagtcttactcagcaaattgaagcggtgcaaagtgcactttaaaatcagtgatagtggttataagcgccgataaataaattatgcccatagtgtaaatgaacagtatgggcatttgtttattaacgaaataagtgaattttcgtattaaagaaagagttcaagtaatgaattaagaaacagtttaccgtggggcgttatctgccaatgggtttctgtttcactgatataacctaatgcgagtgcttcatcaatttgcctacggatagtctcttgtgcaagccccgtgtagtcgctaaaatcttgccgaggaaaagcttctaataaccgaaagcggttcataaaaaattcaaatggacggtcatcattatcaacccaattttgctggtgaagataacgtcctgccataaaacctttaggatgtttggtttttaccgttctcataattcggccatcggcaaaacttatttttccatgagcaccacagccaatacctaaataatccccaaaacgccaatagtttaggttatgttgacattgaaaacctggcttacaataagccgatgtttcatattgttgatatcctgctgcggtgagtaatttgtcaccttcagaaaaaatatcccataacatatcatcatcaggtaatttaggcggacgggagccaaattgcgtattgggttcaatagttaattgataccaagaaagatgtgggggagataaagcgattgcttgttgtagatctgaaagtgcttgagataatgattggtcaggtaagccatgcattaaatcaagattaaagctacgtaagcctaactcttttgctagtctcgcggcatttttagcttcatcggcatcatgaatgcgtcctaagcggatcagtttatcattaccaaagctttgtacaccaatggatatacggttaattcccgcccgttgaaaaccggcaaatcgttcagcttcaaccgtaccaggattggcttccatcgtaatttcagcatcaggagcaacggctatgcgctcttttacgccatacagtaaatcagccattgattcagcacttaataggcttggcgtgccaccaccaataaagatagtttgcacttcacgagagccaacatgagtaagatcagcatctaaatcattgagcagatgttgcacatattcctgatgtggaacttcgccttttaaggtgtgagaattaaaatcacaataagggcatttttgtacacaccaaggaatatgaatatacaaacttaatggtggtaacttaagcattcttaagtgcatccaacattagttttagtgctttaccacggtgagagtattgatttttttgctctctggttaactgtgccgcagtgcaatttagctcagggataaagaaaataggatcataaccaaatccaccatcaccttgcatttcttgagttaacacaccttgccaaataccatggaaaattagcggagtgggatcgttttcatggcgtagataaactaacacacagttaaactgagcttgacgtttctctgcgggaacatctttcattgcttcgagtaatttatctacattttgctgatcggttgcctcaataccagcataacgagcagagtaaatgcccggagcaccacctaatgcatcaaccgagatccctgaatcatcagctatagccggtaagcctgttactttggcagcatgacgcgccttaattagtgcgttttctacaaaagtaagacctgtttcttcaactgagccaacacctagctcagtttgtgcgacaatatctaaaccaaaatcagcgagtaatgaggctaactctgttactttaccggggtttccagtagcaagaaccactttttgcatattatcttccttagtaaagtgtcatggtgattagccactgtaaaacatctacacgtaaataattaagggcataaaggatcaggataacaatcatggctgagaaatctaatcctcccattgccggaataacacggcgaattggggccattaaaggctcagttaattggaagagcagatgatcgataggattacgtccttgactgacccaactgagaattgcacggatgataatcatccaaaaaataatcttacctgctgcggtgagtaattcaataaatgcgaagggtaggactaaagaaaatggaatagcaccacctgctccggataagtaagaagggaggataatttctaataacactaaaacatatgccaagatgaccgaagcagtatcaatagagccaatagaggggataattcttcttaatgggcgcacaacaggttgggtaattttaaccacaaattgtgaaaacggattataaaaatcagctcttacacattgcatccatacacgaagtagtagcacggaaatatagagttgaataagagtcagaatgacgaaatttaaaaagttcattagttggccctgatgaaattaaaactgtttttccatttcttgcgctcgtttaatcgccgcttgcatcgctaaagcaacattctcaggtaatttacctgcatagaattgtgccaatgctgcagctgttgtgccaccttttgacgttacttgttcacgtaatgttgaaaaaggtaagctattttgtttttcagctaatgcagtagagccactggctgcttgttgtacaatagctcttgctacgtcggctgaaaaacctaagcgctcggcttcttgttgcatagattccataaacaagaagaaataagcaggcgcactacccgcaacggcgataatatcattgatagctgattcttgctctacccaaaccgtcataccgacacttttcattaacgcatcagcaaattgtttatcttcaggggtaatagtgttttgagcaaacataccgcttaaccctttgccaaccagtgctggggtatttggcatgatgcggatcagtcgtagcgaagtggctaaataatcattataacgagaagctggaatacccgcggcaatggttagtactaatttttgactaaaatcgatatgttgtaatggcttacaaacttcagccatcatttgcggtttgacggctaatacgatgacatcggcattttcaactgcattgatgttgtcgcaagtactctgtatggcaaactctttttctaaaggctcacgtcgaacctcagaaggtgaacttaccgtaatattttttgcgggataaccaccattaaccagtcctgcaataatagcgtgtgccatatttccggcaccaataaaagcgatattgcgatgttccatactaatttaacctcttttttatttattggcgtaatcacgagcgccaaaaatggccgttccaatgcgtaccagtgttgagccacaggcaattgctgcttccatatcaccagtcattcccatcgacaatgtatcaatatcggggtactggttttgtaactgtttaaatgcctgatgcattttttctagtacctcgacttgcttgttatagtcattttctggggcaggaatagccattagtccgcgcagtttgatccctggcagaatggatatttgtgcagcaaggccatcaagctcggtaagagagatccctgatttactgttttcatcactaatatttatttggatcaaaacattgagtggcggtaacgtagttggacgttgatcacttaatctttgcgctatttttaatctatctatggtatggcaccaggcaaaatgttcagcaacaagacgtgttttattggactgcaatgggccaataaagtgccaaactaaatttttgttttcagcaaaatagctgattttatctacaccttcctgcacatagttttcaccaaattcagtttgtccacatgcaattgctttttcgatatcgctcacaggcttagttttactaactgcaagtagagttatttcgtctggagaacgtccgcatttttgcgctgcggtgtcaatgtgagacctgacattgacgagattctgtttaatagtattcatggcaactcaggagataataagatgaatatggaaaaattaattatatatagtgtaaagcataatgcttccgatctgcacctttgttgtggcgatgtgccacgattacggatcaatggcgtactttatcaacaaaatcaatgtaaacctattacttctgatacgctactcaaatggataacaccttatctgaccacagcgcaattgcaattttttggtaaggaggggcaagttgatacggcgataactcttgctgaggggcagcgcttacgagtgaatttatttcgccaacaattagggatatccgcagtactaagagtgataaattcacagctcccgacattaacatcactacgcgtaccaaaatcaatcactgcattattagataatgtttctaatggacttattttagtgacgggagcaacagggagtggtaaatcatccacattagcagcgatgattgattatctcaatcagcataagcgtcagcatattcttactttggaagcgccaatagagtttatttacaccaataagcaaagcattatccaacaacgtgaaatagggcgcgatgtacaaaatatagcgagtgcaataaaagccgcattacgtcaagatcccgatgtaattatgctaggggaattaagagatctagaaagtattaaaatggcattaattgcggctgaaacggggcatttagtactagcaacattacatacgcaaggcgttgttcaaacgttagagcgtgtcactaatgtattttcatccaatgaacgacaatggatctcggcacaattagctggaagcttaaaagcaattatttctcagcaattggttccagcaacacaaggcgggcgtgttgccctgtttgaagtgatgtatatgacgcaggggattgcacatctgatcagagaagggaaatatcatcaagtgacgacattaatgcaaactgggtttgaatatggcatgcaaaccttcactttaagtcgccaacaacgtcaatatgaaggtttgctcaatgagcacatcaatgaagaaaattaatactgccgttcaaaccagctttctaaaataataacggcagaagttgcatcaacactgcctttatctaaagagcgataccccccttgttcaaaaaggtgagcacgggcttctactgtgctaaggcgctcatcatgtaaggcgatttgtacgccaaagcgtccatgtaagcgattagcaaattttttggcttgggtagtcactagctgttctgtaccgtccatattaagaggcaaacccaccaccactaaatccggctgccattctttaatgattttttcgatttgactccaatctggaataccatctttagctttaaaggaggctaatggccttgctgtccctgtaacttcttgacctattgcggctccaatacttttggtgccaaaatcaaaccccattaccgttctatttgacattatgcatgaccagccgttggtgaaattgtgtggatatcgataccaattagttcggcggctttatgccaacgctctgcaattggggtatcaaaaatgatttgtggggttgcttcaacggtaagccaactattttctaaaatttctctctcgagctggcctttttcccaactggaatatcctaatgagactaaggttttttcaggctgtcttgctgtacctaatgtttctaacacatcttttgacgtggtgatcatggtgctatcgctgattttaatacttgagctaaaaccagaaacaggggtgtgtaagataaaaccatgctcttccgctacagggccaccagacataaccggtttttgtaagctaatcgcactatctctatctgctgagaatatctccaactgctctaagacactttcaatagagatatcttcaatcggcttattaataactaaacccattgcaccgttttcattatgttcgcaaacatagacgaccgagcgttgaaagagcggatcgcttaatgatggcatagcaataagaaaatggttgagtaaattcataatagtaatactgttctctgattgtttttattaaaaaacctagccctattgataatgtttaatataagggctaggtaaagacttttaaaccttaaaacacatcgtttaaaaattagtttttcttgttaaggcgagcttcaatagcatccattaacatacctgtaatagaaacctcaggataagctgcttcaatctcacgagcacaagttgggcttgtaacattaatttccgttaaacgatcaccaataacatctaatccaacaaaaataaggcctttttgttttaagataggtgctacttggcgtgcaattgcccaatcgctttctgttaatgggcgcgcttctccacggccacctgcagctaagttaccacgggtttcccctttggcagggatacgggctaagcaataaggaaccggctctccatcaactaccagaatacgtttatcaccatcaacaatttctggtaagaaattctgtgccatacagaaacggtgaccgtgctctgttaaggtttcgataataacaccgacgtttggatcatcttttttcaggcggaaaatagaggcgccacccataccgtcaagtggtttaaaaatcacatcaccatgtttttcatggaaagcgcgaaggtgtttggcttctcgagtgactaatgtatttggcgttaatgaagggaaccatgctgtaaacagtttttcattacaatcacgtaagctttgtggtttattaacaattaaagtccccatatcttcagcacgttcaagaatataggtagcatagataaattcggtatcgaatgggggatctttacgcattaaaatggtatcaagggagcctaacgcaatatcttgctcttgaccaaattcaaaccacttttcagggttttcttccacacttaacagacgtgtgtgtgcacgggcttcgccttgattaagataaagatcgttcatttccatataatggatttcccaaccacggcgctgtgcttcgagtaacatggcaaagctggtatcttttttaattttgatggatgaaataggatccatcacaatacctaatttaatcattatttctcctttatcccagatcgccgaaccgaacctgcaaagcggtgattgcggtgagtgctgttgtttcagttcttaatacacgaggacctaataaaatatcagtaaaatggtattttgctgtcatggcaatttcttcaggggataatcccccctcagggccaattaatagtcgtacttttttaactggaagtggcaaggtattaatactttggcttgctctagggtgtaaattaagttttaagctatcatccgtttgggcacaccacgcctctaatgacatcaccggcataagctgtggaattttatttctgccacattgttcacaggctgagataataattttttgccattgctgatgctttttttctaaacgactaggatctagtttaacaccacaacgttcagagatcagcggagtaatagtgttaacacctaattcaacggacttttggatagtaaactccattttttcaccacgtgaaagtacttggcctaaatggagatcaagtggggattctctatcatccatttgtccttcattaatctgcacaatcactgattttttgctactttcgataatatcagcatcaaatacttgattggagccatcaaaaagtgccagtttttggccttttgacattcttaatactcgtccaacgtgatttgcagcttcttctgctaatgaagtttgtgtacctgcactgagtggctctggatgataaatgcgaggaatacgcataacgtgaaacccttacgtaaaatgttaaccatgataaacaagatattgtgatatgcatcatacgcatgccattagctcatgcaagttatcaggtggctttttctatcattatagctggattttatttgcgagatttgtcgtaaaacttcatgtttgcaatatgataaaacaaccattgcttggaagtaatagcattctattttagagtcctagattaggaactcgcaaatatcaaggatagatatttatgttattaccgcaaaacatcatgattacaatggccttttttacctttttaaaagggtgtagcgattatttctctacctctgttttagcacgcctctcacctattcgttatcagcaattgtggcaagtctatttaattatctgtttttattggtcttttactatttctaattattcgttattaatattatttctattgtttagtttttacctcttaactctctcgtttttcgatgcagattatcttcagctacctgataacttaactttttggttacttttctttggaattacgcttaatttaacgccttatggcgtgatttcttcaacttgctctttttatggctgtttagtcgcaagtttgtttttttatagtatttattggctcggttattggatatatcaagaggctattttggggttgggtgatgtaaagctttttagtgccataggcgcttggtgtggaatagaactattaccttatatcctctttttcgctgcactattagggattgttatttatatgcttatttgggcttttactaatgtgaagataaagcagattgcctttggctcttgccttgcattttcagcgatagttgttttaagagtaaagacaataataatgtattgaataggctaatatttcttgctgaatattaaataagagtgaggtgtagaatttgtctacaccttcaagtctctatcattatttactctattttcagtaaggtattacagcgtttgctttagaaaagaggtccaactttttgtatcgccaaaataattctctaccgggatcaactggtaggtttggttatcttcaatacatagcgttgggaaaccacgaccatttacttgatgcattaattgttgagtttgctgtatatgttgagttatttcatactcatttacttgcgtaaatagcgtcgaaaaaagggtgatatcaaacccgagtttttgtacgataaaaaatagcacatctttatcactaatatttaatccatcaagataataggcatcttgtaacgcttttaataacatgacatctctatcgcccatttttcttgctaccaatatcgctgcaattggcatcagtgagtttaatgtcatctctgtattggcgaggttatcacggtattgctggctaaaaatttgtcccgataactggctaatacgttcatcgataggggtaacatgctctttccatgcatcgccccctgtcacttttcttgtcggggtaaataatcccccaccatgtagtgttagtacatgtgggtattcgtgactcactacttcaataagtggggcaatgccgtagcaccacccacaaagtggatcgtaaatatagtgcagctttttggtgctattttcttggttcacatggcttactgaggccatttcatctctcctttaaggacttttgcgctaagctctaaactcgatttatctgctaagtcaggataacttttttccatcgccgcaataaattgttctgagttttgagtttcagcgagtttagtttctgcctctttaaggtaattcattgtgaaatcaacagaacgcatatcataattactttttggaacataatgtcccggaataaccgttttaggtgataacgttttaatctgttgtaacgcttctagccaatattggcgttgtgctttagattgagtatctgctagccacacatgaatattttcagacagtattaccccacccataatagcattcagttttggcacataaacataggttctttctggagattggctatctaatcctttgatatagagtttttcaccttcaagagaaaaactatcaccagtaacgacttcaggaatgataacttttttaggggcattgtctttgaggacaggcccccagtaggcaagttttcctgcttgggtttcattaatgattttgacggtgggagctgaggcaatcactttagcatttggaaatgcttcagtaatgacatctaacccaaaataaaaatcgggatcagaatggctgatatagatataagttaaatttttccctgatgctttaattttatcgactaaggcttgagcatcatttttttggaattgagcatcgattaagacagcatctttatcaccataaatgatttcagatgaaacagggaatacactggcatcaccggggttgtagatatctaatgttaactctgttgccataacagaagtggcgaaaaacgcagtagttgcaagtgttaaaggaagtaattttttcatctttattttctccatcatgttgatgcgttctataataggttgcatgaaatgggagaaaaaccctgttttggtgaatacattgttgcataaatcgagcaaataatatggacaaaattaaagcatcagaggtttttgtgaccatcgttaagcaaggtagcatgattaaagctgctgattatctaggtatgtctagagcaatggtgacgcgctatcttaatgaaatggaggagtgggctggggtgcgtttgttgcatagaacaacccgtaagcagagtctgacttccgtgggagaattagtttatcaacaaagtttacaactgctagagatggcggagcgtattcccgcgaatattcccaaagagagtcaccaaatcagtgggctggtgcgtattacaacggcacaatcactcgctaattgtgcattatctgtggctataactgaatttatacaactttatcctcttattgcagtcgatttgcaaatatctaatcagacagtcaatcttattgaagagcgtattgatattgcattgcgtattaccaaccatttagagcctaatctgatagcccgccctttagcaaaatgtttttctgtggtttgtgctcataaagattatttagctaaacatggtatccctaacacgccggatgatttgacttatcatcaatgtctcacatatcgcttttttggcagtagcttatgggagtttagtttaggtgatgagcgttattctgttcctgtaggtggtaatttaagtgccaatgagtctgttgtgttattgcaagccactttgcaaggtgccggagtctccttacaaccttactgctcagcaaaaccctatcttgaacggggtgagttagaaattttgttagcggattatcagccacagcctatgggaatttatgccgtgttagcgagccgacaaaatatgcccgcagccgtgcgtgttttactggattttctggttgactggtttgcttcttcgcctcattggttgtcattatcgggtgaacgcgtgagttaattgttttggataattggctaaagtggttttcatcacatcaataaaatagcgcacaagttgtgatgaggggcgatgagatggtgtgatcaaactcaccgtaaatggaatggtaaaactcagtggccgtatacagagatcactatattgataatcaagggcagtaatagggttaacgatagaaacaccaatgcctttactcaccatggcacaaattgaggccgcactttgtgtttccatgatcaattgtcgagtgatcccctgtttaataaacatagcatcaataagttgtcgataactatcattagcagataagctgataaaacgagtttgatgaaagtcttgtggctgcagtaatgcttttttacttaacacatgagactttggcaaaatagcgacttcatttaacgttagcagtgtttcttgttgggttccggcaggtgtttgtgtgtgctctgttagccctaagtcataatgttgtgcagataaccactcctctaataaaggagactcctgtggcactatcgttaaattaacctcgggatattggctgagaaattgttggcaaattgagggtaatagtgattgagcaaatgccggtaaacaggtgatatttaattccgcttgatgaaaatggcgaatactattggctgcggtaataatgcgatcaagtccataataagagcgctgtacctcttcaaaaaatcttaatccttccgtggtaggttgtaggcgacctttaattctatcaaatagcttaaatgacaatagctgttcaagacgtgatagttcgcgactgactgtgggttgagacgttttcagtaaatctgccgcttcggttaggttttgtgtggtcatcactgcatgaaaaatttcaatatgtcgccaactaaatggagttttcataaattttatcctatatcacaagtgaatagactatagctaatttgatatttttattcccgctttaattgcttaataatatttttattcaccctacattgctgagtaaaaaatgatgacaacatccaacaatgcgatcctatctcaattagcacaaacttatggcacgccattatggatctatcaaggtgagactatttctgaacatattgagcaattaaaagcctttgatgtggttcgttttgcacaaaaagcctgctctaacattcatattttacggttaatgaaacagcagggcgttaaagttgattctgtctcactaggtgaaattgagcgggcgttggttgccggtttccaaggtggtcgcgagcgtagtgaaattatctttaccgcagatttactcgatgaaaaaacgattgaacgtgtggttgaattagatattccggttaatgcaggttctattgatatgcttcgccaacttggagaacgtcatcaagggcacgcggtgtggataagaataaatcctgggtttggtcatggacatagccaaaagaccaatacgggtggggaaaatagcaaacatggtatttggtatgaagatgtgccagaagcattagcggtaattaatcaatacaatttgagtttggttggtttccatatgcatattggctcaggggttgattatcagcatttagcgagtgtctgtgatgcaatggttgagcaagtactcacctctaatgttgatattaaagccatctcggccggtgggggattgtcaacaccttatcagcaaggagataaaagagtcgatttaaaccactatttctctttatgggatagtgctcgtcaacgtatagcgcaacaccttgggcatgatattgaactggaaattgaaccaggacgctttttagtggctgagtctggcgtgttagtgtcacaagtaagggcggttaagtcgatgggaaatcgtcattatgtgctggtggatgcagggtttagtgatttaatgcgcccagctatgtatggtagttaccatcaaatcacattattagataaatacggccaattaaaatctagcgagtttcaacaagaaaccatagttgcggggcctctttgtgaatctggtgatgtgtttacccagcaagaaggaggaatggttgctcctcgtttattacctccggcagaagttggtgattacttagttattcatgatacgggggcttatggtgcatcaatgtcatctaactataatagtcgtccccttattcctgaagtgttaatttcacagggcatacctcaattaattagacgtcgtcaaaccattgaagagctattagcgctagaaattaacctgtaacttttactattcctcccagtgtgatcatctcccaataaaaaacacctcattattaaattaaaataatgaggtgttgtatccgtgtttcagtcgttaaatggcagactatttattgacgatcataacggcataattaggctgctttatctgtttttattgtatcagttgacgacttttttgccggcaccgccaaggcatcaaagtcaaattcatccacattaatactacgtaaacggctttgctccgctttgcgtaagatatcagcttcttcgggagtcactcgtttatcggctaaggctttatccgctaatttatctaattgagtgaagctaaatttcttttcatagagtcgacagatacgttcaaacagtggctctgcggctaaaatatcgagcagagcttcttccattaaaccatgaggattgtgctcactgggtgtgaggaattgtcctttaccaatacgatcacgggtttcagaaggttgttggataatttgagccactttactatctaacttatctgaaggcagtttctgcactttacccagagggaaaataatggcgcgcagagctcctgcaacaaaacgatttgggaaattgcgtaatagctcatcaatggcattttctgcttggtataaacactctttaataccccagtgtaccagtggtaaatcagcggtattacgaccttcatcctcataacgttttagcaccgcagaggcgaggaaaatatgacttaaaatatcgccaagtcttgcagaaatacgttcacgacgttttaaactaccacctaaaacccccatggcaacatcagaaagtaacgccatgttggcactgagccggttaatttgttggtaataacgacgagtttcatcttttgttggcgcggtacttaagcgaccattagtgatacctaaccaaaggctacgtaatgtattactggcaacatggcctaagtgaccaaataaggcatgatcaaagtcgtgtaagttgttatctctagccgctgcaatttcatctaaaacataagggtggcaacgaatagccccttgtccataaatgatcatgctacgagtgagaatattagcgccttccaccgtaatggcgatgggggagccttgataagagcgagccacaaagttggaagggccaagacaaatccctttcccaccaacaatatccattgcatcaataatcccgcgttgcgctctatgggtacaatgatattttacgatagcagaaagtacggcaggcttttctcctaacataatacctgtggtaattaaggttgaagctgcgtccaagagataagcattaccagcaaggcgcgctaatggctcttcaattccttccatcttcccgataggaagcttaaattgacgacgaattcgagagtaagcacctgttgccattgctgcactttttaagcctccagtggagttagatggcagtgtgataccacgaccgactgaaagacattccaccagcattctccaaccttggcctgccatttttggaccaccgataataaaatcgataggaacgaaaacatctttaccacgagtgggaccattcataaaaggaacattgagtgggaaatggcgatgaccaatttctaccccttttacgtcggttggaattaaagcacaagtaataccgggattttcattatcactcagtagatggtctggatcgcgaagtttaaaagcgagtcctaatactgtggctataggtgctaaagtaatatagcgtttattccatgtgagacgaataccaaggacttgctcaccttgccaatctcccatacaaaccacaccactatcagggatagcgccagcatcagagcctgcttcagggctggttaatgcaaagcatggaatttcatcacctttggctaaaccaggtaagtaacgttttttctgctcatcagtaccataatgttgcaataactcacctggacctaatgaattaggtacacctacagtgatggcgagaataccagaaacacccgcgagcttttgcagtacacgagattgtgcataggcagaaaactctaatccgccatactcttttttgataatcatcgcaaagaaacgatggtcttttaaatattgccaaatctcaggaggtaaatcagctagttcatgtgtgatttggaaatcattggtcatgcgacaaacttcttcaactggaccatccagaaaagcttgttcttcagcggtaagttgtggcttaggataattgtgaagttgtttccaatctggtgctccacggaataattcaccttcccaccatgttgttcccgcatcaatggcctcttgctctgtcttagacatagatggcatcactttttggaaagcctttagtgcaggggctgagatatatgctttgcgaatagaaggaagagtgaatggtaataatatcaatgcaacgggcagtaatagccagtagctccagatattggctaaacccatcacgaaagtataagcaataagtaagatactgcttactacaaggctgtattttcggtaactaagtataccgatgagaactaagaaaagcacaatactgagtagggtcataataaaactcctgtatttgcaagacatcagaggtcagacctgttgtgtgttatttagatctaatgcagtcaccaagttttagcaatatttttacattctaattacaatgtagctcacaaattattcgtaaatgagagaagttagcatttgtaggtaaagaggtgcttctttcgtatcattggatccgttacactgagaaatagatattttttgatcccttttctggagtaaaaatcctatgtaccaagatcttattcgtggcgaattaactgaagcggcagatacactctctcgttttttacaagatgatgcgaatattgaagccattcaaaaagcagctgtattattagcagactcatttaaagcaggcggcaaagttttatcctgtggtaatgggggatcacactgtgatgccatgcattttgcagaagaattaacggggcgctatcgtgaaaatagacccggttatcctgctatcgcaatttctgatgtgagccatatttcttgtgtgagtaacgactttggttatgaatatgttttttcacgttatgtggaagcggtaggtaaagagggtgacgtattactggggatctcaacttccggtaattcaggcaatattattaaagccattagtgccgctcgtgaaaaaggtatgaaagttattactctaacaggtaaagatggcggaaaaatggcagggagtgcagatattgaaattcgtgtccctcattttggttatgccgaccgtattcaagaaatccatatcaaagttattcatattctgatccagctgattgaaaaagaaatggaaaaataacgatatagtaatattgccttatatgaataattaaagtgtgagtaagtaggagcgggcgatgtgtgaattgttgggcatgagtgcaaatgtacccactgatatcaattttagtttaagtggcctcattcctcgtggtggtaaaactggccctcataaagacggctggggtatcaccttttatgaaggattaggatgtcgtacatttaaagatccacaagctagtgccgtttcacccgtcgctcgttttgtacaagaataccccattaaatcacatgctgtcattgcgcatattcgccaagctaatcgaggtaatgtcagtttagaaaatacgcatccttttacccgtgaactgtggggtaaaaattggacttatgctcataatggacaacttaaaggttatcaatcactggatacagggcgttttagagcggtaggacagactgatagtgaaaaagccttttgctggatattaaatcagcttgaaaagcgttaccagagaacaccatctaattggccggcggtctttcgtttcattgctattttagctgatcaattgcgacaaaaaggtgtgtttaatatgttgttatccgatggccggtttgttatggcatattgttcaactaatttacactggataacccgtaaagctccttttggtaaggccaaattgctggatcaagatattgaaattgattttcagcaacacactaaagcggatgatattgtgtcggtaatatcgacattacccttaacaggtaatgaatcttggcaaaaaattcctgttggtgagtttgttttatttgatcgtgggttgcgaattttgtaaccatttactatcgatacttttagctaaatttaatgtggaaatagcctcacgattattcaccaaatagcgaccgttttttacactaatcgatgggatctttttgtattcttccacatattggtaagcaggtgctaactgttgccaaaaatccatattggcagagtattggaattttttcatattttcggctgtcattttaaaagggaaaatatgaatattaatgctctgttggccatttttcagcgcaagttcggcatattggtagatttcatccatcacagtatcggtcattgcgtagcaacccactgatttacaagcaccgtggatcatcaagaaatcaccggtataaccttgctcttgatcgtattgattaggaaatcctaggttaattgctcgataaaaccgactatttgggttaagctgagtttgattaacttgataaaagccttcgggactttttaaatcaccttgatatttcttcggacctaatcctcccgaatagctacaaatgggataagtacgtattttctctaattgtccatcctgtttttctatatacagttctagtaagttttcttctttaaatatttgaatatagatgggctctcctgtactttttttaacaggtttgataagaaattttgaactattttcagcgttaacaaataatgaggttaatattattgttaaaaatatgattaattgttttgcgtgactggtcatggttttatcaaaaaaaaggcttaaaatttgttgataaactagattgtagattgcaatgaagcaatcaatttgtaaatttaaatctactatggtttcttttctattacaaaatattctgtataaaacttaatcgttggtcgagaaatgtgatattttaattcggtttatgcgaattgttaacgtttcagtcaaaataatattcccatttgcttgagctaaatcactcgaatagtcagacaggctgaaactgagatgataaaattcagatcggcagaataagagaaaatagtaacaattatcggagataaataacttagggtatcaaactaccttaaggtgtttttattacagagtcgctacattttcggggtgaatttgtagcttagggtttaactgataaacttgtgcaaatcttatgattaaaattaaaaaaggactcgacctcccaattgcaggagcgcctgcccaagtgatagaagacggacccgcgattcgacacgtagctttgctaggtgaagaatatgtcggaatgcgtccttctatgatggtttcggaaggtgagcatgttaaaaaagggcaggttctttttgaagataaaaagaaccccggtgtaatattcacaagccctgcgtgtggtaaagttgttgccattaaccgcggtgagcgccgtgtacttcaatccgttgttattgaagttgacggcgatgaagaagtcactttcgacagttatgatagctcatcactttcagaattgacccgtgaacaggtagaaacaaacctagtaaattcaggtttatggacagcgttaagaacacgtccatacagtcgttcccctaaattaggaaccacgccggtggcaatttttgtcactgcgatggatactaatccattagcggcagatcctactgtgatcattgaacaaaacgagcaggcttttaacgatggtctgattgttttaagtaaattaacagagggtaaggtgcatgtttgtcatggtgaaaaagcaccggctaaactcaatgatggacaaattagctataaccaatttgttggccctcatcctgcgggattagtgggtactcatatccattttttagagccagtcagcgcgaaaaaaatggtatggcatcttaactaccaagatgttattgcgatggggtatctctttactaccggctctttatataccgagcgtgttgttgcattagcgggacctcaagttaaagcccctcgattattacgtacctgtttaggtgctgatctttatgaattaacgaaagatcaattagtcgatggtgataatcgtattatttctggctctattttatggggttggaaatcggacgaagcgcatcactatttaggccgttttcataaccaagtctctgtattacgcgaaggtcgtgaaaaagagttatttggttggggttatccaggtactaataaattctccattacacgtaccacaattggtcacttcttaaagaacaaacgttttgcatttacaaccacaatgaatggtggtgaacgttcaatggtgccaattggtaactatgagcgtgttatgccattagacattatggcaacacatttgttacgtgatttgattgtcggtgatactgacagtgctcaagcattaggttgtttggaattggacgaagaagatttgggactatgcacttatgtttgtccaagcaaatatgagtatggcccagcactgcgccaagtattgaccaaaattgagcaggaagggtaactcatggggttgaaaaatttatttgaaaaagtagagcaccattttgagcccggtggtaaatacgccaagtggtatgtactctatgaagcggtcacaacggttttttatacgccgggtacggtgacacgtaatggttcgcatgtacgcgataccatcgatctaaaacgtatgatgatccttgtttggttatctgttttcccagccatgttctggggaatgtataacgttggtcaacaagcgatccctgctcttaatcagttgtatagtggtgctgagttacagcaagtgattgcttctgattggcactatgcacttgcacagtatttaggtgcatcattgacaccagatgctgggtggggaagtaaaatgctccttggggcaacttactttttacctatctatcttgttgtatttgcggtaggtggtttctgggaagtgttattttcccttattcgcggacatgaaattaacgaaggtttctttgttacttctattctgtttgcgttaattgtgccacccacattaccattatggcaggctgctttaggtatcacctttggtgtcgtaattgcaaaagagatttttggtggaacaggacgtaacttcttaaaccccgcattagcagggcgtgctttcctcttttttgcttatccggcacaaatttcaggtgatcttgtttggactgccgctgatggtttctctggtgcaacccctctctctcaatggtctgtttctggtcaaagtgcattgttaaataatgtcactcagcagcctatttcttggatggatgcattccttggaaatatccctggttctattggtgaagtctcaacactgatgatcctaattggcggcgcaatcattttatttgctcgtatcgcatcatggcgcattgttgccggtgtgatggtgggtatgattgcaatgtcatatctgtttaacttgattggttctgactctaatccattattctcaatgccttggcactggcacctcgtattaggtggctttgcatttggtatgatgtttatggcaaccgatccggtatcagcttcattcactgataaaggcaaatgggcttacggtattttaattggcgtaatggctgtgctaatccgtgtcgtcaatccggcttacccagaaggaatgatgctagcaatcttattcgccaacttatttgcaccgctgtttgactatgtggttgttcaggcgaatattaagcggagaaaagctcgtggctaaagaaaaaaacaaagatagcgtcggaagaacgttcctcgttgtatttattctatgtcttgtttgttccgtggtagtggctggctctgctgttggacttaaatctaagcaagaagagcaaaagctactggataaacaacgtaatattctagatgttgctggtttattggtgcctaaaatgagcgccagtgaagtactcaaagtttacgatacacgcattaaagctaagattgtaaacttcaaaactggcgaattgacagacagtaaaggcgactttgatttaaatagcgaactacgtagcgatgaaacctctatcgcactatcacctgaagaagatattgcaaaaattcgtcgtcgtgccaataccgcagaagtttactttgttcttgatgatcaaggtaaaacccaagaagtggtactgcccgtctatggttcaggcctatggtcggtcatgtatgcctttgttgcggtagatattgatggtgtaacagcgaaggggattacctattattctcatggtgaaacgccggggctaggtggagaagttgataatccgcaatggaaggcacagtggaaaggtaaacgcttactgaatgaagaaggtgtgcctgctattaaaatcgtacgtggcggggcatcagatagtccttatggtattgatggcctttcaggtgcaaccttaacctctaacggcgttcaacatatgttcgatttttggttaggtgataaaggtttcggcccattcctgaaaaaagttcgtgaaggagagatcaatggctgatacaaaagagatcaaacgcgttttactcgggccgttgttagataataacccgattgccttacaggtattaggggtctgttctgcattagcagtaacaaccaagcttgagacggcactagtaatgaccattgcggtaacattagtgacggcattctcaaacttctttatttcactgatccgcaactatatccccggcagtgtacgtattattgtgcaaatggcgatcattgcttcattagtaattgtggtagaccaagttttacaagcgtacgcttatgaaatatctaaacagctttctgttttcgttggtcttatcattactaactgtatcgtgatgggacgcgctgaagcctatgcgatgaagtcaccacctatcgaaagctttatggatggtatcggtaatggcctaggatatggggttatcttgatccttgttggatttttacgtgagctatttggttcaggtaaattatttggcattacggtgatggaatctatccaaaacggcggttggtatcaacctaatggcttattcctattagcgccaagtgctttctttattattggcttgctaatttggggattacgtacattaaaacctgcacaggttgaagaggactaattgccatggaacattatataagcttatttgttcgtgctgtttttattgaaaatatggcactggcgttcttcttagggatgtgtactttccttgcggtatctaaaaatgtaaaaacagcatttggattaggtattgcggtaaccgttgttctgggtctttctgtacctttgaataacttggtttacaactatgtactacgcgcaaatgcattaatggaaggtgttgatttaagtttcttaaactttatcactttcattggtgtgattgcggctctggtacagatcctcgagatgattttagatcgctacttcccttcgctatataacgcattggggatcttcttgccactgatcactgttaactgcgctatttttggtggtgtgtcctttatggcacaacgtgactataactttagtgaatctattgtatatggtttcggctctggaattggctggatgttagctatcgtattactggcttctattcgcgaaaaaatgaaatacgcggatgtaccgtcaggtatgaagggattaggagttacttttgtcaccacagggttgatggcattaggtttcatgtccttctctggtgttcagctataaagggtgagaagaactcatggatataattattctaggtgttgcgatgtttaccctgattgtattggtgctaactgcattgattttgtttgcaaaatcaaagttagtcaatacaggggatattgaagttgaggtgaatggagatcctgaaaaaagtttccatgcgccagccggtgataaattactcaacgtattatcaaacgaaggtatttttatctcatctgcatgtggtggtggtggctcttgtggtcaatgccgcgtaaaagtacttgaaggtggtggagatattcttcctactgagctttctcatattaataagcgtgaagctaaagaaggttgccgtttagcttgtcaggttaacgttaaaaataatctgaaattagagctacccgaagagatcttcgggattaaaaaatgggaatgtgaagttatctcaaatgataacaaagccacgtttattaaagagttggtattaaaaattcctgaaggtgaagtggtacctttccgtgctgggggctttattcagattgaatgtcctcctcacactgtgcgctatgaagattttgatgttcctgaagagtatcgtgaggattgggataaatttaatttattccgctatgtttctgaagttaaagagaccacagtgcgtgcatactccatggcgaactacccagaagagcatggcattatcatgttaaacgtgcgtattgcgacaccgccaccacgtaatcctgatgtgccaccgggaattatgtcatcttatatttggtcattaaaaccgggtgataaagtgacaatttcagggccgtttggtgaattcttcgcaaaagaaactgatgcggaaatgatcttcattggtggtggtgctggtatggcaccgatgcgttcacatatttttgatcagctaaaacgcttacattcgaaacgtaaaattagcttctggtatggtgctcgttctgtgcgtgaaatgttctatacagaagattttgatatgctggctaaagagaatgaaaactttacttggcatgttgcgctgtcagatgcattaccggaagataattggacgggttacaccggctttattcacaatgtgctctatgaaaactaccttaaagatcatccagcaccagaagattgtgaattctatatgtgtggaccaccagtgatgaatgctgcggtgatcaaaatgcttaaagatttaggcgtagaagatgaaaatattatgctggatgactttggtggttgatttttcacataaagtagataaagcataacagtatgaaatgacaagcgcccactaatgtgggcgctcatgatcagaagagagatatatgttaaaaagaaagatgatgcatgggatcttgatgctatgtgcactggttttcttatcagcctgtggtgaaaaacagcaggtgttagaaggcgaaacgatgggaacttactattcaattaaatatgttcctagtagtgattcaccttcacaaagcgtcttacaaacagaaatcgatcgtattcttgaagaagtgaacgatcaaatgtcaacgtatcgtcctcaatctgaattaagtcgtttcaatcaaagtcgtgaaattaatacgccattcccagtttcacccgctactgctaaagtcgttagtgaagcgattcgtattaataaaattacggatggggctttagatgttactgttgggcctttagtcaatttatgggggtttggccctgaaggacgttttactcatcaaccttcagccgatgaactagctaaacgtaaaaaatggacgggaattgattaccttgcagtggaaggtaatacattaattaaaaaaatacctgagctttatgttgatctctcttctattgctaaaggttacggtgttgatgctgttgccgaatatttgatttctcaaaatattaccaactatatggttgatattggtggtgaggtgagaacacaaggtgttaatggtaatgataaaccttggcgcattgcgattgaaaaacctgctaatgatggcaccacacagagtgtacaattaattattgaaccgggtgataattcgattgcgacatcgggggattatcgtaactattttgaagaagatggcgtccgtttttctcatacgattgatcctacaacaggtcgcccaatcaaacataaccttgcctctattaccgtaattgtacctacttgtatgagtgctgatggtttatcaacagggttaaatgttctggggcctgaaaagggcttagaggtagcaaataaattaaatattcctgtttttatgatagttaaaactgaaaatgggtttgaagagcgttatagtaaggcattcgccccattcttgaaaaagtagaatttaaggagagaaggttatgttaaaaatatttctttttgccttcatcttgttcttactggcattctttggaatggctttaggatatattgttaaacgtaaaagtattcagggcagttgtggtggtttaggctctattggtattgagaaagagtgtgattgtcctgaaccttgtgatgctcgtaaaaaaagaatggcgaaagaagctgctcgccaagagctattgcaaaaaaaccgcatcttatagtttggttatcgatgcatttttttgctaacgatagatttatcaagtaatagctaaaataaaagagtgacgtatattttatacgccactcttttttgtttagaaaaatcgctttcagataaggatattaagctttttaatactgtgattaagtcgctgctacttccaaggataagggttactgccttcccactctaatacttctttttttgcctcatcataagaatagccataatgctcttggagtttccctatcagttgctctctggttccttcaataatatccagttcatcatgggtgagttttccccatttttctttcacttttcctttaaataaattccagtcaccagaagctttattatttaacatcttattccacctaacttatttctgtttattgacactattaagtgtagaagagaaatgtattaaggtaaaaaagcgccaatgtcgcaacgatgtttactcttttctgaatgcttttattttagctggagaatcaaccataactgcatcagcacctaattctactgcttgcaaataatctttctcagtattgataccgaataaaacgatatgcgcattaccccccgcacgaaaacaagacatcgcatctttgtcccaacttaatacagccgctgaacgagcttcacctaaggtatatttttcaaccacctcaacttttctgtgcagttcaaggccataccaacgtgtgatatcaagattttctggcagtaaacagatatgtcccatagtaatattggctaagatatcgcgggtaacatcacgactttcaaagcgttgtacgttatcaggtaacgcatctaaaaaagcactattggtagaataaacacgcgttctctctaacgcattatgtttgcttaataccgaagctaatgctttgccttgtataacgggatcggcatcaggtgattttaagtcaatatagaattgtgttttaggaaattgagtcagaatatactccaatgtcgggatagtaactcctttattgcgatatggaaattgttgtgcttccccatatttatatcctgcatcccattgcgccaattctttggcagtaaaggttgaaattgccccttgcccattagtgaggctttttagatcacttggacgataaagaacagggacattatctttagacagttgaacggttatccaaattgcatcagcttgattgcttagtgctgttttgatagcaatttcggtattttcaggtgcatccgctgtgccacctctgtgtgcaataattttaggagaagtcataacaaatactgagtaaaagaggaatgaaattgcaataaatattttgatcatataactctatttccttgttttatatttgattttcaaataattacgataaaaataaaaagagcagaataagttaaaagtaatctatcattactgtgtgacatttctataaacaaacgtacttaattaaaataataatcactaatatcacttaaaataggtatagatcagggaataaaaattgtagttaatggttatttactgtatatttaaacagtaaatagcgtgaggtgattgtatgcggaaaattattcatgtcgatatggattgtttctatgctgcgattgaaatgagagataaccctacattaaaagagatccctattgcagtcggtggtaatgcttctcgtcgaggtgttatctgtactgctaattatcctgctcgccgttttggtgtccgtagtgccatgtcaacggctacggcattaaaattatgccctcatttaaaagtattgcccggtcgcatggcattatataaagagacttcagctaaaattcgtcaaatatttgcccgttatacagatttaatagagccgctttcattagatgaagcttatcttgatgtctctgatagcaaacactgtcacggctctgccacattgatagcgcaacagatccgccagcaaatttttgctgaacttaacctcacggcttccgccggtattgcgccgattaagtttctcgccaaaatagcatctgatttaaataaaccgaatggacaatatgtgatcacccctgaacagatggatgactttattttaaaattaccattaaataaaattccgggagtaggaaaagtcacctttgctcgattacaagagatgggattagaaacctgtgctgatgttcgtggtacggatgttatttccttagtgagaaatctaggtaaatttgggcaaagcttatgggagcgtagccatggtattgatgagcgattaatcaatcctgaacgtttaagaaaatctgttggtgttgagcgcacactggctgaagatattgattcatgggatgagtgtttagcattgcttgatggattatatgatgaattagaaaaacgattaagccgagtgaaacctgatcttagaattgcgagacaaggggttaaattaaaatttgatgattttcagttaaccacccaagagcattctcatcctattttagaaaaaacggatttaattgatattgcttatcaggcatggcatgaacgtcgaaatggcaggggagtaagattagtcggttttcatgtcacgttgcaagatccacaaatggaacgacaacttcttttagcattataagtattaaaaaaccatagcgagcatcaaggcgcactatggttaatgtatttaaatatactttttaattaatagatgatcaccagcggtaatttatcgttgctgtcatggttctgccaatgccataaaaacaggcagtttcacccgcacaagaggcaacatagtgtttgttggcaatattattcatatttagttgaacttcagccccttttaaagaggaggataactcgcctaaagaataacctaccatggcatcatacaaagtgactgcaggtacactaatcgtatttttagtgtcaccttgagatacaccgatatatctcacaccaaagcccgctttagcaccattaaatagccctgatgtttcatcatactgcccccaaaatgatgccatatgtttaggaacccgtggtaattcttttccttgtgtacctgcggtgatggtttttctcacttcagtatcggtataagcatagctactaataaatgatatattttcagttaattggctattaatttgcgcttcaataccacggcttctaatttcacctactggctcaaaataggctttttcagcgttatagttagtcacattacgttgttgtaattggtaaatagagagtgttgctaatgtctgttcatttggggtgaggtattttattcctacttctaattgacgtccttcacttggctcaaatggtgcactacccggagctcttcgtgtctgtaaattaggttcaaaagaggtgctataactaatataaggtgaaataccattatcaaaggcatagagtagacccactcgaccggttagcttctggtcgtcttgttggtctttgctgcttttgatgtgatcataggtacgaacttgcgcccaatcttggcgtaatccccctaataagatccagtttttccattggatctgatcttgcaaatagatccctaactggtcgtgtttttgtaattgatttgtcaccggtttttgtaaactgatatcaataggataatgataattaggatttcgccaatccagatcatattctgggcccatcgcttgcaataaattgtctttatttttactccattgataatcaatacctataattactgtatgcgctaatttttcagtatcaaaatcagcttgtagtcgagtatcaataccaaatgtatctgtttctcgtttttcctgttgagctcggcgttcaagaatataagggttatcttttcttaatgaaccaaaaacaagatatttatatttttgtttgatatggctataacgggcattttggatcaattttaatctatcattaaattcatgttcaaattcataaccaacgccatattgttgacgccatgattggtgataatcagcattatttacattgaaatcaaatggaatggtgccttcgggtgttgttttgaccgtaccataagctggcaaaaaattacggtatcccgcttcgggctcttgttgaataaaacttaataacgttaaacgtgtctgctcatttggcaaaaaagtgatggcaggggcaagggcaaatcgttcttctttatagtctttaatttgagtttgttgtgtttttgctaatccattaaggcgatagagaatacgattatcatcacttaatgagcctgcaaaatcaaaagctgtctctgctaatttatcatttcctacacgtgcttgaatatgattaatggttgttgaagtgggtcttttgctggtcattgccacaagaccacctggatttaattgaccatatagaacagaagacgggccacggatcagctcaactctctctaatagccaagggtcaatagctcctgtagaagatgaggctcccataccataactaagtccatcaagaaagcgaggggcatagctatacccacgaataaagatttcatcatttcggtttgaactgccgcgatattcagtgaaaacgccaggtgtataccgcaatgcttgagagacagaactgacatcttgcgcatccatctggtcacgtgtaatgacactgattgattgtggtgtcttatctatatcactaagtattttatttgttgatagtgtttttgttgccactaaacctgaaattggtccttgcggatcttgtgagggggatgcggtaacaatgattttatcaggtgaattttgtgtcattgcggcatgaatttgtaacgataacagactgaaggggagagtaagtaataggttggtagcaataatttttttagacactgttgatccctttaaatttttaatttttctttacctaaaatgcggtaatggtgaaaataccattatgtaaatattaatactaatgataattattattattctataaattatttttattagtattaattttttattacaaaatagtataagaattggcttttataaggtgggttgggaataagttatagggagataaaataacaaaaaacccgcctattaagcgggtttgataactgtttttaagtagaattatttagccgggatcgcttttaaaatagctgtcagtaactgccagtattggcctacactcttaatgtgtactcgctcatccggtgagtgtgcaccgcgaatagttggcccaatagagaccatatccatatctggataaggttttttaaatagaccgcactcaagacctgcatggatcaccataatatttggcactttatcaaatagttgttgataagtgtcgcgtactaagtgcataaccggtgaatccgcatcaggtttccagccaggataaccacctttggtttcgatatctgcttgagcaagtttggctaatgctgtcagcatgctaacaacataagttttaccgctatcaatcagagagcgaattaaacataggatttctactttatcgtcaacaatactcactacaccgacgtttaatgaggtttcaaccacaccttccacatcatcactcatgcgaataacaccatttggcatggcattaagtaaattgatagtgcgagattgacaatcagcagtaaatactggtttttcggtgctagtatctgttaattcgatagctagatttttttcagcaatggctaattcactttttaatagcgcttcaaattctgtggtaatgctatttaattgagtcgctttatccgcaggaatagcaaaaataatatgcgcttcacgagggatagcattacgcagtgtaccaccatggaaatcaattaattttagtgctaattcatccgcatgttcagcaaggaaacgcgctaataatttgtttgcattacctaaacctaaatgaatatcaccacctgagtggccgccatttaggccttttagtaccagttttttgacgatatggtttgcaggaatagcttcataagtgaggtctaccgtggttttaacatcaataccaccggcacaacccatatagatttcgccttcttcttctgagtctgtattaatcagaatatctgcttgtaaccaaccaggctgtagtccaaaagcaccatccattccagtttcttctgtcatggttaacaatacttctaaggggccatgtttaacagtatcgtcagctaatacagcgagtgcagaagccataccaacaccattatctgcacctaatgtggtgcctttcgcttttacccattcaccatcaatataaggttggataggatctttggtaaagtcgtgttcggtatcgttatttttttgtggcaccatatctaagtgcgcttgtaaaacgactgttttacgatcttccatacctttggtggcaggtttacggattaaaatatttcctaccgcatcgcgctcaacagataaacctttttctgtcgcccaagccataatgtgggacgctaaggcttcttcatggtatgaagggtgtggaattgaacaaatttttgcaaaaatatcccataatggttgtggggatagagtagatagttcagacacgatggatctcctctaacagcatctgtgttatgaatagcctaccgctttcttaagggttagctttattattctgagcgttattcgccaaatataattgagaatatcactttcttttgatgaatgcgtcattctcttacgtatctatctaataatttggatttctgtgttggtgttcgcttttttattgcgtgttttttagacaaaaaaaatacatatcaggaaaaatgaggattatctcgaccatttttatgttttctctggtttttgaacgctcaaatcactataatctcgcgcaacctttttttccgcaaaaaagcttctctcgaatttcaagtagctaggatcacaatattatgagcgaaaaatatgttgtaacgtgggatatgttgcaaatacatgcccgtcaattggcacaacgtttgttaccagtcgaacaatggacaggcattattgccgtcagtcgtggtggattagttcctgccgcattacttgctcgtgaattgggtatccgccatgtggatactgtctgtatttctagctatgatcatgaccatcaacgtgacctcaaaatcttaaaaaaagcagaaggtgatggtgaaggttttatcgttgttgacgatttagttgatacaggtggcaccgcaaaagttatccgtgaaatgtatccgaaagcacattttgtcactatctttgctaagccagaagggcgtccgttagttgatgattttgtggtcgatattccacaaaatacctggattgaacaaccttgggatatgggcgttatgtttgttccccctgtttgtgataaaaaataatttatcttaatcaattaattcaaatatattgataaaatcctcgtttattgaactgaccccagttcctatgcgaggattttttatatcggctttatttttgatgaccttacgcttttcctatctcttcgtgctgatgttgatctgctattccactgtagaagtgaaatccatgttatgatatgagcagaattttgagcctcattatacgatacacactgatttgaagagtgatatggcaaataatacaaatctttctgaaacgttatttaaacctcgtgctaaacatgcggaaacctcaacgttaatacagtacacacaccctaaatctaatattgattcgtactctgtacttaatgggatgagccagcaaaattggtatcgcacaattcaacgtctacagtggatctggcgaggtatttcccccatagagatcgaagaagtattaagtcgcattgctatttttgatgcgccacgcagtgatgataaatttattgatacagtcgttggttatcgacgtggcaactggtcatttgaatggtctcatcaagcaatgatttggcaacaaaaagcgttacgagagacctcagaggaagcagccgctgattgttggttacgagcggcaaacctttatagcattgctgcttatccatttattaatggcgattttcttgctgatcaagcggtagtattggcgatgaaagcttttgaaaatgccatgaaattctcttcatttgaagtaaaaaaactgacgtttaaattaacaggtaaaggaactaccagtggatttttacatctacctaaagggtgtaaaggaccttatccaacagtcattttttgtggtgggttagatagtttacaaagtgattatgttaacttttttaggcgctacttatcaccaaaaggtatcgcgatgttaaccgtagatatgccatctattggttattctgttaagcagaaactcagcgaaaatacctgtcaattgcatggtgatattttacagcagttgggagatattccatggattgatcacactcgagtgggcgtaatgggatttcggtttggtgccaatattgcggtgcgtttagcctatctttatccaaaattgattaaaggtgttgtggcattagggccattaattcatgccttttttactcaagcggaattacagaagaaaatccccattatgtatctcgatgtactggcgagccgcttaggattattaaatatagatgaaaacaatctcagactatcgttaagtagttattcactgaaaaaccaagggttgattggtcgtcgtatgccagtgccgatgatgagtgtttattggaaaggggatgaaattagtcctaaagaggattcgcagctcattgctcgctcttctatggatggcgatatagtagaaataaaagaaaaaccactttataaagggcttgaacaggcattaactaaaagcgcagattggatctatgctaaattaatataaataatttcaaacaataacttgctaattataatagattatataacagtagaggtgataaggagactgaatttatgacttcatctttgcaccctacccgaggtaagttattaaaacgttttgctcaaataggaccttatatccgtgagcaacaatgccaagaaagccagtttttttttgattgtttagctgtttgtgtaaataagaaagtcacaccagaaaaacgagagttttggggctggtggatggaacttgaacgtaatggtgaacagttaatttattattaccaagttggcctattcgataaaaatggcgattgggttaatcaagtaataagtaaaaaagatgtgattgaatcaatacatgaaacacttattcgttttcatgattttctacaagcggcggtaagtgaattagagatgacgctagttccagatgaaaaaatgagcaattttcctcttccccttaagccctaattttgtgttagggcaacttttcatagattttgcgttatgtcagttggcataacgcttctctcctgataaaacagtgtatgatcttttaaatcaacaaaaaatggtaaatgttatgagtagcagccaaacgctggttgttaaattagggacaagtgtactgactggtggttcacgacgtctggatcagtctcatattgtagagctggttcgccaatgtgcaaaacaacacgaaaaagggcaccggataattattgtcacgtcgggagcaatagcggcagggcgtgaatatttaaactaccccgatttgcccgcaacaatagcatctaaacaactgttagccgctgtggggcaaagtgctttaattcaggtatggaagcagctatttgctatttatggtattcatattgggcaaatgttattaactcgcgcggatatagaagatagagaacgttttttgaatgcgcgtgatacactgcatgcattattagataacaagattattcctgttatcaatgaaaacgatgccgttgctactgcagaaataaaagtaggggataacgacaatctttcggcattagctgccattttaggtggcgctgataaactcctgttacttactgatatcgaaggtctatatacggccgatcctcgtagcaatccggatgcgaagcttattcctgaagtttttgatatcaacgatgaattacgtcaaatggccggtgatagtgtctctggtttaggtactggaggtatggcaactaagttacaagcggccactgttgcagggcgtgctggtattgacgttgttattgccgccggtgttaagcctgatgttatcagtaaagttattgataatgaacctgtcggaacactctttcatggtttaaaaagcccccttgaaacgcgtaaacgatggatttttggtgctccagtcgcaggggttatcattgttgataatggggctgaaaaggcgattaaagagcaggggagttctcttttacctaaaggtattaaagaaattaaaggtgacttttctcgagggtgtgttatccgcattcaaagtttgcaaggaaaagatcttgctcatggtgtcgcgcattataatagtgatgcgctacgcttaattgcggggcaccattcgcaagagattagtcaaattttaggttatgagtatggcagtgttgcggttcaccgtgatgatatgattgtgagctagggagtataaatatgttagaacaaatgggaaaagcggcgcgagaagcttcttggcacttagctcagctatcaaccgaacaaaaaaatcaggcactgttagtcatcgctgatttattagagcagcaagaagccattattcttgctgctaatgaaaaagatatggtggcggcacgagagtctaatattaatgctgcaatgcttgatcgtttattactcacatcagaacgtttaaaagcgatcgctgatgatgttcgccaagtttgtcatctagaagatcctgtaggtcaagtgatagatggtcgtttattagacagtggcttacgtttagaacgccgccgagtccctttaggggttgttggcgttatttacgaagctcgtccaaatgtgactatagatgtagcatctttatgcttaaaaacagggaatgcggctattctccgtggcggaaaagagactcaccatactaaccaagccgttgtcgcggtgatccagcaagcactagaaacatgcgctattcctgcggctgctattcaagctatcgataagccagatcgtgaattagtcgcaaaaatgctaaaaatggatgagtatattgatatgcttattcctcgaggtggtgcaggattacataagttatgtcgtgaacaatccactattcctgtgatcacgggggggattggtgtttgtcacacctttgttgacgaaagtgctgatttagaccaagcattaaatgttattattaatgctaaagtacagcgtccaagcgcatgtaattcgttagaaacgttattggtacatgaagctattgcggagagtttcttacctcaattaagtgatgcgatggcagcacaaaaggttactttgcatgccagtcaacgcgctataactgcattgaaaaagggacgtgcgacggtcgtcgatgtgactgaagcagattattgtgatgaatggttatcactggatctgaatgttgaagtcgttaatgatttaacagcggcaattgctcatattcgccaatatggtaccgcgcactcagatgctattttaacgcaatctatcagccatgctgatcgctttgtacgccaagttgattctgctgcggtatatgtgaatgctagtacacgttttacagatggtggacagtttggcttaggtgctgaagtagcggtgagtacacaaaagctacatgcacgaggccctatgggattagatgctctaaccacctataaatggattggttacggcgacaatacattacgtcgctaataatcccttaaatagctaagccatactttcataaagtgtggctttatttttttgtattgtgaggtatgatacttaatactttacacattgtaaattttagattacacccatttagcgggttaacacagcggagagagtgcatttatggaaagtacaatttaccttataggacctagaggtgcaggaaaaacaacagtaggtaaagcgctttctctatctttagattatcaatttattgatacagataattggataacagataaatatcaacaaactatttcttctatggttgaagcggaaggttgggatgtatttcgccaacttgaatcagatgcgcttattcaagttagccaacctaaccaagttatttcaacggggggagggatagtgttggcagaaaaaaatcgtgtttatatgaaaaattcaggtgtaattgtttatttacaagcttcacttgaaactttagttgagcgtttatctcaagatcctaatgaggcacaaagacctagcttgacgggaaaaacattagtttcagaaatacatgatgttttaattaagcgtgagcctttatatatgcaatgcgcagatattattgttgatgctggattatctattaatgatattattgaggtcattctcgcaaaactcgctaaataattaggaagttgtcctatataaagacgaaaacaaaagacaactattttattttcatcatatcctatttatagtaaggctaattatagcaaaatgagatatggatatgatgttgatagcgttttttaaaacactatttaaattcttatttcgagtaagaattgaaggactaattaatcagttttcacaatatgaaaaatgcattattacgccaaatcatacatcgtttattgatggtatattattgcgtttatttttaccgattaaccctgtctttgctgtttacacctcagtggctaatgccaaacataccaaatggctcagtcgttatgcggatattgttcctttagatcccgctaatccaatggcggttcgccaattagttaaagaagtcgataaaggccgtcctgttgttattttccctgaagggagaattacggtaactattggtttgatgaagatttatgaaggtgctgcgtttattgctgctaaatcaggggcaaaagttatccctgttagaatagaaggtgctgaatttagctacttttctcgagtgcataaaacgttaaatataaaagcaaagctctttcctaaaatcacaataaaagtgctacctgcggttgatttacctatgcctacagcggaaaaatcagcagagcgccgtcgcttatcgggagaaaagctccgtgatattatgatggatgctattatgcaagcacgtcctaatatcacgctctatgaggcatttttacaaggaatgtctcagtttggtcgtttcagtcctcttatttcagatattaatatgaaagaggatagttatcagggcctattgaaaaaaatattaggtgttagtcgtattattgaacgctataccgaacctaatgaacgaattggccttttacttcctaatactaccgttacggttgcggctttatttggggcaacgatgcgccaacgggttgtggcgatgcttaactatactgcgggtagcttaggtgtacaaaatgccatgaaagcggcatccattaaaacgatttttacctcacgccaatttttagagaaaggaaatttattacatattccagaacagactccggatgcaaactgggtttatcttgaagatctcaaagatagcattactagagaagataaacgctggattgcacagcacttactcactcctcataaagcgatgttagcgcaaaaatcgacggatgcagcagttatcttatttacttctggatctgaaggcactccgaaaggtgtcgttcatagccactccagtttattggcgaatgtagagcaaattcgcgctattgctgacttttcacccagagataaatttatggctgcattaccgttattccatgctttcggtttaacggtaagtgtattagcacctatctgcttaggggcacgagtattcctctacccaagcccactacattatcgtgtagtacctgaattagtgtatgaccaaaattgtatagtattatttggtacttcaactttcttaggtaattatggcaaatttgctcatccttatgattttgctcgactaagatatgtggttgcaggggcggaaaaactgtccgaatcgacacgagtattatggcaggataaatttggtattcgtattttagaaggttatggggtcactgaatgtgctcctgttgtctccattaatgtaccaatgagtgctaagccatataccgtggggcgtttattaccaggcatggaagggcgtttaattcccataagcggcattacggatggtggaagattacaactgcgtggtcctaatatcatgcttggctatttgcgcgttgagtccccttataaattagaacagcctacagcaataaatgccgaaggcatcgaagaagtgggttggtatgatacgggagatatcgttgctattgatagcgaaggtttttgcactattaaagggcgtgtaaaacgttttgcaaaaatagcgggagaaatggtttctcttgaaagtgtagagcaattagcggctaaagcctcggaaggcaaccatgctgtggtggcggtaaatgatccacgtcgaggtgagtcattagtgctttttacaaccgataagcaacttgatcgcagtatgttatcggcattagctaaatccactggtgtggcagaaattgcggtaccaaaagatattcgttttctcaaagaaattcctgttttaggaagtggcaaaacggattttgtctcgttaaagcaactcgctgaacaggaaaataattaatgtcagagaatataagtcagcccccattactgagtaagggcatgaaagcagtattattatcacagtttctttctgcatttgcggataatgctttgttatttgccatactcgctcaatttaaatcagcactttatccagaatggagccagcctattttacaaatggtgtttgtgctggcttatattctcttagctccctttgttggacaaattgccgatcgccagcctaaaggtagggtgatgcttactggtaatgcgttaaaatttgccggtgcttttcttatttgtattggaaccgatccattcttaggttacgccttagtggggatcggcgccgccatttattcgcctgctaaatatggtattttaggtgagttaactgatggcgagcgtttagtcaaagcaaatggcttaatggaagcatcaactattgcggcaattttattaggctctgtgattggtgggcttctttccgattggagcattatcttagcattagctgtctgtgcgataatgtatgctttagctgtattggttaattttagcattcccaagttatcacctgctcaaataggtcgaggctggaatattaaaaaaatattcaatcaattcttagctgcttgtggctctttatggcgagataaagagagccgtttttctctggtaggaacaagtatgttttggggggccggcgtcacattgcgttttctattagtgcaatgggtgcctatagctttgggaatgactgataatacaacaccaacaatattaaatgcgatggtggcgattggtattgtgattggcgctggtttagccgctaagtttgtcacattaaaaacggtccgtcgttgtatgcctgccggggttttaattggcttaggtgttgtttacttctcattacaaaccaccattattccagcctattttatcttagttgttattggcatttttggtggcttctttgttgtaccattaaatgctttgctacaagataaaggaaagcatagtgtgggagcggggaatgccattgctgtacaaaatttaggtgagaataccgcaatgttactgatgctaggtttgttctcgctagtcaccagtatgggtatttccgttattacaattggtattggctttggtgctatctttgcgctagcaattggtggattatggttgtgggattgcacaagaaagagagctgaataacgttaattgagagtcgaggtgaaacaaccttcatgataaataatgatgaaatgacccatctgagcattgaagtcggtcaggctctgctaaaacgaaaaaaaacgttaactactgcagaatcatgtactggaggatggattgcaaaagtcattactgatatagcaggtagctcagattattatcatcgaggttttgtgacttacagtaatcaagctaaacatgacatgattggtgtagatgagcaaacattgtctgattttggtgccgtgagtgaacaagttgtctgtgagatggcaaaaggggcattgctaacagcaaatgcagactatgctgtatcggttagtggtattgcaggtcccggcggcggtagtgaagagaagcccgttggtttagtttggtttggctttgcaataaaaaccccagaggggcttcgagtggttgctaaacactgtatttttagtggatcacgagaggaggtgagagcccaatctgtgattttctctttaaaatcaattcttaaagaaattattaataattaacttgatactgtatgattatacagtataatgagtttcaacaagcaaaatcatatacgttttaatggtagtgacccatctttatgcttcactgcccagagggagataacatggctattgatgaaaacaaacaaaaagcattggccgcagcacttggtcaaattgaaaagcaatttggtaaaggttctatcatgcgtctgggcgaagaccgttccatgaacgtagaaactatctctacaggatctttatcattagacgttgctttaggtgcaggtggattgccacgtggccgtattgttgaaatctatggccctgaatcttctggtaaaacaaccttgactctacaagttattgcctctgctcagcgtgaaggaaaaatttgtgcatttattgatgctgaacatgcattagacccaatttatgctcaaaagctaggtgtcgatatcgataatctactctgctctcaacctgacacaggtgaacaagcactggaaatttgtgatgcattatctcgctctggtgcggtcgatgttattgtcgtggactccgtggcagcattaacaccaaaagctgaaattgaaggtgaaattggtgattcacacgttggtttagccgcacgtatgatgagccaagctatgcgtaaactagcgggtaaccttaaaaactctaacacactactgattttcattaaccaaattcgtatgaaaatcggtgttatgtttggtaacccagaaaccacgaccggtggtaatgcgcttaaattctatgcttctgttcgtttagacattcgtcgcattggctctgtcaaaaatggtgatgaagtcattggtagtgagactcgcgttaaagttgttaaaaataaagtggctgcaccgtttaaacaagctgaattccaaattatgtacggtgaaggtattaatacctatggcgaactgattgatttaggtgttaaacataagttagtagagaaagcgggtgcttggtatagctacaatggcgaaaaaatcggtcaaggtaaagctaacgcaaccaattacttaaaagaacaccctgaaatgtacaatgagttaaacactaaattgcgtgaaatgttgttaaatcatgctggtgaattcacaagtgctgcggattttgcaggtgaagagtcagacagtgatgctgacgacacaaaagagtaattagctggttgtcatgctgtttgtgtgaaaatagaccttaaatcattggctattttcacgacagcatcccattgaataacttgtctgtataaaatttggtcagatatcaaaggaagccttaaaaaagcttcctttttgttttatgtaaaaattaaccactcagtggtagtgaaaaattagtttatttttcactgtttttctttttttttgcaatttattactattttatcagcaataacaatatttttatctttggggggattacactatgtaagtgtttatatagtgaagatttggtgatgtattctattggttatttataacatcatatttcttttacatgtttgaaaaaacagcattaaaataacttgttagcatctatctatatagataatcaatctctttgactacgagagaaatggatttttgctactttattattttaaatttatcagtaaatatatttagttaaatgattctggcgggatttttattcagaaaaattaaatatgtaatgggaatattggctttttttgataatacagatttaggatagctgttgcgagcaaatgagcaaaatgctattgataataaactaaaaatgacgaaaaaattatttaatagttttattatgaaattatcgtcattaccttctcatatcttacaaaattcgcctcgatttggttaaaacgacctatcttgaagtatgttgctactttcagaaaactactagacgatttacaatgtcaactcgaataagtttatcgggggttttacttctgagcgaagaaattctatcttatccctacttatgtattcgttggctaagtagaggtaaaactaaacctcctctaactagatttctaatttctgtttttccagcttgatttcgggataattatgagcaaaagcaccgctgagatccgtcaggcgtttctcgacttttttcatactaaaggacatcaaatagtaccaagcagttctttggttccaaataatgatccaacattgctgtttacaaacgcagggatgaaccaatttaaagatgtatttcttggattggacaaccgaccttattcccgagcgacaaccgcgcaacgttgtgtgcgcgcgggtggtaaacataatgatttagaaaatgtgggttatacagcacgtcaccatacattttttgaaatgttaggtaactttagttttggtgactatttcaaacatgatgcaattaactttgcctgggaattattaactggcaaagagtggtttaacttacctaaagagagactttgggtaaccgtttatgccactgatgatgaagcttatgatatctggaataaagaagttggtgttccagctgagcgcattattcgtattggtgataataaaggcgcaccatttgcttcagataacttctggcaaatgggagatacggggccttgtggtccatgtactgagatattttacgatcatggtgatcatatttgggggggaccgccagggacacctgaagaagacggtgatcgctatattgagatctggaatatcgtctttatgcagttcaaccgtaaatcagatggtacaatggatccattgccgaagccttctgttgatacgggaatgggattagagcgtattactgctgtactacagcatgttaactctaactatgatattgatttattccgcgcactcattaaatccgttgctgaagtgactaatgcgacagacttagcaaataaatcattacgtgtgattgccgaccatatccgttcttgttctttccttgtttgtgatggtgtcattccttctaatgaaggtcgaggctatgtgctacgtcgtattatccgtcgtgctgtacgccatggttatatgttaggtgcgaaagatactttcttctataaactcgttgcaccgcttattgatgtaatggctgaagccggtaaagaacttaagaatcaacaagaaatcgttgaaaaagtacttaaaacggaagaagagcagtttgcacgtactttagagcgcggtttacaattattagatgaagagctagaaaaattaaccggtgatactttagcgggtgaaacggctttccgtctttatgatacatatggtttcccattagatttaactgcggatgtttgccgtgaaagaaatatcaaagttgatgaagaaggctttgaactggcaatggaagagcaacgtaaacgtgctcgtgaatctagcggttttggtactgactataacgaactgattaaagtcgatagtcgcagtgatttctcaggttatgaccataatgagcaacaaggtactattaatgcgattttccataatggtcaaacagtcactgagcttaaagcaggtgaagaagggattatcttcttagataaaacggctttttatgctgagtctggtggccaagtaggtgataaaggtcttctgattggcaaagatagccagtttgaagttaccgacacgcaaaaatatggcaaggctattggtcatattggtaaagtcatttctggatcttttattgttaatcataagatcaatgcagtcattgatgtggctcgtcgtgatgctattcgcttaaatcactcagcaacgcatttattgcatgcggcattacgccaagtattaggcactcatgttacccagaaaggctctttagttaacgataaatatctgcgttttgacttctctcactttgaagcagtaaaaccagaacagttacgtgaaattgaagacattgttaacgcgcaaatccgccttaactcgccggttgtcaccgagttaatggatcttgaagatgcgaagcaaaaaggtgcgatggcactctttggtgagaaatatgaagaacgtgttcgtgttttaaccatgggggatttctcaactgaactttgtggtggtactcacgcagccagaacgggtgatattggtctattccgcattatgagtgaatcagggactgcggccggtattcgccgaattgaagcgattacgggggctacagcgattgaaagtgttcatgagcaatcggatctgatttctcttgtggcacatgcacttaaaagtgatggtagtaatttagttgagaaaattaaaacggttcaagaaaaataccgttcattagaaaaagaacttcaacaactgaaagatcagcaagcagctcaagaaagctcctcgttaggaagccaagctaagaatgtgaaaggtatcaaacttttagttcgtgaactgaataatgttgaaccaaaaatgttaagaacaatggttgatgatttaaaaaatcaattaggttcagcaataattgtactttctactatttctgatggtaaagtgagcttaattgtcggtgtgactaaggatttgactgctaaaataaaagcaggtgagctaattagttttgtcgctcagcaaatcggtggtaaaggtggtggtcgccctgatatggcacaagctggtggtacagatgttgaagcgttacccgctgctttagcgagtgttgacgagtgggtagaatcgcatctttaagcgatagctacctgaaaaagcgttatccctagtttttaggggtaacgctttatgtaatattgacaatccgttaaataatcaatcacaaaatttatattttgttatgaagtatgggctatatgtgataaataatgattatacgaattgacaatgtatgatggataatggccgggaaattctagagacccgactcttgtaaattttcaaggagcaaagaatgcttattctaactcgtcgagttggtgaaacgcttatgataggcgatgatgtaaccgtaaccgttttaggggttaaaggtaatcaggtacgtattggcgtaaatgcccccaaagaagtatctgtccatcgtgaagagatctatcaacgaattcaggccgagaaaactcagcccacagataactactaagcaatctcttatttttagctagttaccctttcttcgtaagcgtccacacttttgccgggtctgggcgcttttcttttctatagaactttccattttctttctcgttcttcacctcgctcttttgaactgtatttattattacactatccgcttattctgattgacagaattgaaagtctttttactgcttatcattcgattcataattattagtagggggaataaaattattcgtcgatgagataaaatgcttgaatgatttttcatcagcgatatcatggtattcagttcttttttagcctttcttgctgataaacgcatcagtttgtttgtgaagtgttcaaacgaacctatattcgtaaaaagttgagaaaaattgtttgacttctcaggctgagaaagtaatatgtgcgccacacagagacgagatgttcacaaagaacttcttcgagtggttctaaatatggtgagatggccgagaggctgaaggcgctcccctgctaagggagtatgcggtcaaaagctgcatcgagggttcgaatccctctctcaccgccatttagatttgcatccttagctcagctggatagagtactcggctacgaaccgagcggtcggaggttcgaatcctccaggatgcaccatattccaaccccatgattaaatgtatggggtttttattttggtgcaaatagtgaataatttgcattaaaagagtaaaattaaacaacgtgcatccttagctcagctggatagagtactcggctacgaaccgagcggtcggaggttcgaatcctccaggatgcaccacttatttctcgacattgcacaatgtaatgtgagaggcaaaaagataacgacgcatccttagctcagctggatagagtactcggctacgaaccgagcggtcggaggttcgaatcctccaggatgcaccatctttttataaagttagcttatcttagttaaattagtacgactgcatccttagctcagctggatagagtactcggctacgaaccgagcggtcggaggttcgaatcctccaggatgcaccatctttaaagcctcgcttatcgcggggctttttgctttttctctttcctgcattgtttatatattatcgatttgtttcgcatcaactaataacgccgatatcatctaatcagcgacaatttggtgactttgcgataaagtaactgttatctacttattaacattaaccaacgcgggaggtcacctttgatcccggacgtatctaaagcgctttcttggttggaagcccatcctaaagttttatgtggtatccaccgtggtatagagcgagaaaccttaagagttactcctgatggtcatttagcggctacaggacaccctgtcgagctaggtaagtcactcactcacaagtggatcacgacagattttgctgagtctctgttagagtttattactcctgttgacgataatattgatcacaccttacattttttaagtgatttgcatcgctatacggcacgtcatttaaccaatgagcgtatgtggccgatgagtatgccttgctttattgaagccgaagataaaataacattagcgcaatttggtacctctaatgttgggcgttttaagacgttatatcgagaagggctgaaaaatcgttatggtgcgttaatgcaaactatttctggtgtgcattacaatttttcgttacctatcgaattttggcaagcgtgggcaaatatcaccgatgaagaaacaggtaaagaggcgatttcagacggttatttacgtttgatccgtaattactaccgttttggttggataattccttttttctttggtgcttcgccagctatttgtggttcattcttaaaaggtcgaaaaaccaatttaccctttgaaaatacccctaaaggcgccaaatacttaccttatgcaacttcgttgcgcttaagtgatttaggctataccaataagtcacagagtgatttagatattacttttaatcatctagagacttatgtgaaaggtttgaaaaaggctattcataaaccgtcagaagaatttgctaaattaggtgtaaagaaagacggtaagtatattcaattaaatactaacgtattacaaattgaaaatgaattatatgcgcctattcgtcctaaacgcgtagtcaaaggggatgaatcaccttctgatgcattattacgtggtggtatcgaatatatcgaggttcgctcattagatatcaatccatttacgcctatcggcgttgatgaaacacaaatccgtttcttagatttattcttgatttggtgtgtattagcggatgcaccagaaatgaatgcagaagaattggcctgctgtcgtgcaaattggaataacgttattctagaagggcgtaagccaggtcaagttattggcatgggttgtggtgaaagaaaagagccattagcacaagtggggaaagcgctttttgctgacttacagcgcgtagctaaggtattagatagctgttctggaactaaatatctagaagtttgccttaagttagaggaaatgtttgataatccgcaattaaccttctctggcagattattagaaaaaattaaagcacagggtattggcggttatggtctatctttagctgaagaatatcatcaacaattagtcaataccgcttatgaagtgttaacagatgatgcttttgaacatgagagaatttcatctattaaacgtcaggcagacttagaaaagagtgataccatttctttcgatgaatatttgaagctccatgctgggccaaataatgatggtgtggcttcttaaaactcagatagaaaaaagccacactaaaatttgtgtggctgaataaattctatagagaaatagggatgataacattttgcgcgtattcattactaagaccgaggcgctcgcagaaagtttcatgttctcttaaaaatatttaaaaattttcttaggaggttttttatgccgttattggatagctttactgttgaccatacacgtatgtctgcacctgcggtacgcgttgctaaaacgatgaaaacaccctctggtgatactattaccgtttttgacttacgctttactgtcccaaataaaaaagccatgcctgagaaaggaattcatacgttagagcacttatttgcaggtttcatgcgtaatcacttaaatggtgaaggtgttgagatcatcgatatttcgccaatgggatgtcgtacaggcttttatatgagcttaattggtcagcctgatgagcaacgtgttgctaatgcatggaaggcagctatggaagatgtattgaaggttaaagatcaaaaccatattcctgagcttaatgtctaccaatgcggaacttatgaaatgcactcgttagctgaagctcaagatattgcacgagacattttatctcacactattggcattaatcataatgatgaattagcactaccagaagacaaactcaaagagttacaaatctagttacagttgctttatagataaagagacaataactcaagctatttgctcttgatttgttgtctcttttaatttgatgggtgatttatcataacggccaacgccaattgcattgaaccgctattaataatcgctagtgacgagagggcgtaagatggcggatcaaggctttcttaatcacattgtcttgcacttccaacacttcaaattcataaccatcaatcgttattttggcacctactacgggtaaatcacccaactcttcaataataaccccattaattgttcgtgcttcattttctggtaaatggcaagcaaaggctttattgatatctcggatattagttgtgccatccactaatagtgaaccatctttttgtgggatcacttcttctgctaaagaaggagacattgaggtagtaaaatcaccgacaatctcttctaggatatcttcaacagtgactaatccttgaatttcaccatattcatcgacgacaataccggctttttcattattacgttgaaaattaactagttgtaagctaagtggtgtactttctgggataaaatagattttatcagccgctttaatcaaaatttgtttagtaaattctttcttctctgtcataagacggtaagcttcgcgtactcgtagcataccaatgacatcatcgagggtatcacgataaaggacaatacgcccatgaggggagtgagttaactgtctgacaatggatttccactcatcattgacatcaataccaaaaatttcatttcttggtaccataatatcgccaatggtcactttttctaaatccaaaatagaaatcagcatattttggttacgctgtgacagtttcgattttgattcattcacaatggtgcgtagttcttcttttgataccgcattaccctgtattacgggggatttaataccgaaaatgcgcataaacactaaggtaatttggttaaaaaaccacacaacgggcaacatgattttctgtaaaggtgacaaaagaacgctacttggataagcgaaacgttctggataaagcgctgcgatagattttggtagtacctcagcaaaaataagaatgacaaaggttaatacacctgttgcaatagctactcctgcatcaccatataaacgcattcctacaatagtggcgagagcggaggcgacaatattaatcaggttattaccaattaatactaagctaatcaatctatcgggacgctgtaatagtttttctactcttttggctgagcgattaccttgcttggccgcgtggcgtagccgataacgattgatagtcatcatgctagtttcagtgcctgaaaaataggctgaggcaaagatcataccgataagtatgataatgagcgttgttgtcgacacatgctccaaaattgagttccttttgctaccttaaaatgaaaagattaattaagcattaactcttgcaataaacgattaccaaaaaaagctaatgtcaaaataatggcaccgatcaggttaaaaataaccacttttttcccacgccaaccctcacggaagtgtccccataataaaatgatgtagacaaaccacgcaataatagaaaatattgatttatggatattttctttaccaaaaatattatccatatataacaggccggtacacaaggttaatgtcagtaatactacccccacttgggtaatatgaaacattttacgttcaattgacattaatggtggcatttgtggtgaaaattttagtttcttattttttagttgatagtcgagccagctgagttgtaaggcatataaagcagcaattaacaaagtggcgtaacttaataaagcaagcccaatatgaataaagagcgatgtgctactttcaaggtgggtgacaaactcacctggcatcaaggcggcaataatgagattgactatggaaaagcaataaacaataggcagcaaaaaccaagctctaccacgggaagcaacaatggtcatgataacgcagaccattaaactgaccaccgcccctaaattggtgagtgacagattttgcccgctatgtggacggaaaatcaaaaattttaatgagatagcatgggtcacaagggcgaccaccgcaaaaagcagcgctaatccacggtatccattttgctcttttctcagcaaactggggagaataaacaccagactgagtaaataagcgcagacagcaacgatagagattgatataacgggcatagtttcgcttacataatagggtacataattgcttagtatagcgctaggtgaattccgctccaactattgaagtcattaagcgtaaatctctatgcagagatctgcgcgtcatcgtgatataatcgataaaatagacgacagacaagcccaactttaacactgagctaagataatgtttgagaatttaagtgacagattatcgcgcacattgcgcaatatcagcggcagaggccgactgaccgaagaaaacattaaagacacactgcgcgaagtgcgtatggctttattagaagctgatgtggctttgcccgtggttcgtgagtttattgcacgtgtcaaagagagtgcagtaggtcatgaagttaacaaaagtctgaccccaggtcaggaatttgtcaaaattgtacaaaatgagctggtaaatgcgatgggagaggtcaataacgatcttgacctttcagctcagcctcctgccgtggtattaatggctggtttacagggtgcgggtaaaacgacaagtgttgctaaactcggtaaatttttaaaagagaaaaagaagaaaaaagtattagtagtttctgctgacgtctatcgtcccgcagcgattaaacaactggaaaccttagccgaaacggttggtgttgactttttcccttcaacggtacaagaaaatcccgtcaccattgctagcaatgcgttaaaacatgctcagctccaattttatgatgtattgctggtggatactgcgggtcgtttacatgttgatgaaggcatgatggaggagatccaacttcttcataaagcaatcaatccagtagaaaccctatttgttgttgatgcaatgacaggccaagatgctgccaacaccgcaaaagcctttaatgaagcactccctttaacaggggtggtattaactaaagttgatggtgatgctcgtggtggtgcagcattatctattcgtcatatcacagggaaaccaattaaattcctcggtgttggtgaaaaaacagaagcattagaacctttccatcccgatcgtattgcctcacgtattttaggcatgggcgatgttctttcattaattgaagatatcgaaagtaaagttgaccgagcgcaagctgaaaagctggcaactaaactaaaaaaaggggacggttttgatttaaatgatttcttagatcagttaaagcaaatgaaaaacatggggggcatggcgagtatgctaagtaaaatgcccggcatgtctcaggtgcctgatgcggtgaaatcacaaatggacgactcaattttagtcaaaatggaagctattattagctcaatgacgaaaaaagagcgccaaaaacctgaaatcatcaaaggttctcgtaaacgtcgtattgcgatgggatcgggaacacaagtgcaagacgtcaaccgcttattaaagcagtttgatgatatgcaacgtatgatgaaaaagatgaagaagggcggcttggctaagatgatgcgtggcatgaaaggtatgatgccaccaggctttccaggtcgctaaaagcaaaaagtccgaaaaaaacgtcgctttggattgcttttttcgccaaagtgagtaaacttttcgggctttttatatgacaaccggacgccattcctcgatggggtctggttgttttgttaactaatgaggatgttatggtaacaattcgtttagctcgtggcggcgcaaaaaagcgtccgttttaccaagtagtcgtgaccgatagccgcaatgcgcgtgatggtcgttttattgaacgtgtaggtttttataacccactggcaaccggtaatgcagaagaattacgtttagacgtagaccgtgttgaacattgggttgctcaaggcgcaactgtttcagaacgtgttgctggcctgatcaaatcagcgaagaaaagcgcttaatctgtcgcggtggtaacaatgagcgaacaaaaaacctttaaagagcctgtagaacctattgttatgggtaagttgggctcaccttacgggatccgtggttggctcagagttttttcttccaccgaacatgccgaaaacatttttgaatatcaaccgtggtttattcaacgacatggtcaatgggaatccattgagatagaaacttggaaacaccacaatcaagatattatcgtcaagctaaaaggtattgacgacagagatgctgcaaatattttgactaattttgaaattgtcgtaagtgctacacaacttcctgatctagacggtgagtattactggaaagatctgatgggttgtcaggtagaaactgacaagggctacgatttaggtgtcgttaacgacatgatggaaacgggctcaaatgacgtcatggtaatcaaagcaaatctgaaagatgcattcggtgtcagggagcggttagttccgtttcttgatgggcaggttatcaagaaagtcgatctctcagcgaaaaaaattatcgttgattgggatcctggtttttagattctccggttaacggttctcaacagtgggacagtgcaaatgtggattggggtaattagcctatttcctgaaatgttccgcgctataaccgagtacggggtgactggtcgggcagtgaagcatggtctgctgaatgtggaatgttgggatccccgagatttcacttatgacagacatcatacagtagatgatcgcccctatggcggtggtcccggtatgttgatgatggtacaaccgttaagggaagctattcatcaagcaaaagctgcggcaggtgatggtgcaaaggtgatttatttatcacctcaagggcgcaaactcgatcaacaaggtgtttgcgaattggccacaaatgagaaattaattctggtttgcggtcggtacgaaggaatagatgagcgtgtcattcagaccgaaatcgatgaagagtggtctgttggtgattacgtattaagtggtggggaactccctgccatgataatgatagatgcagtagcacgttttgttcctggtgttcttggacatgcggcttcggcgaaagaagactcttttgcagaaggattactggatcatcctcactatactcgtccagaggtgttagatggtatggcggttccggcagtgttactgtctggtaatcacgctcatattaatcgctggcgtatgaaacaatcgctgggccggacctggctaagaagacctgagcttctggaaagcctagctctgactgacgagcaaagagtgctgttagcagaattccagcaggaacatttgcaaagaacagcagagtaagtctgacacaaagtgtcattaatatcagtttacctagggtaagagagttattatgagcaatattattaaacaaatcgaacaagaacaaatgaagcaagatgtaccttcatttcgtccaggcgataatgtagaagttaaggtatgggtcgttgaaggttctaaaaaacgtctgcaggcattcgagggcgtggttatcgctattcgtaaccgcggtctgcactctgcatttactgttcgtaaaatttctaatggcgaaggtgttgagcgtgtattccaaactcactccccagtcgtagatagcatcacagttaaacgtcgtggtgcggttcgtaaagctaaactgtactacctgcgtgagcgttcaggtaaggctgcacgtattaaagagcgtcttaacgctaaataatacgctttcgcacatccgaaagttatggttaaaaggccagcatcagctggcctttttttgactataacctgctctatttcctctaatgtcttctatctttttataagcactcgacaatagctcactctcttgcctatttttctcatcattaaataacatctcttataaagtcgtttcatctgctaggtgaaggccaatttcttgcgggtgtaaaattaaaattacagtctgctatttttattttatcttagtcacattttttgtgttattttggatatttataatctattgatttataagaataaatctaacaatatctctattatgtaaacatatgattacgattataccttttttattgaaaatatggattgatttctttacattgcatgttatcttatcgtttagacacacaaaaatcacaatgacagacataaaaaaggtaacgattatgatcatgcaaaaagacgcactcaataatgtcaacatcagcgaagagctggtgttaattacgccggaagagttaaaacaaaaatacccgttgagtcgtaatgatctgcatgccattactcaatcacgtcaaactatttctgaaattgttcaacgtcgtgatccgcgtttattagtggtatgtggcccttgttctattcatgatgtcgatgttgcgttagattacgcaaaacgtctaaaagtcttagcgtctgagttaagtgatagtctgtatattgtgatgcgtgtctattttgaaaaacctcgtacaacagttggttggaaaggtttaattagtgatccgtttatggatggcagttttgagatggaaaaaggcttacatattgcccgtaaactattaacagagttggttcagttaggtttacctttagctacggaagccttagatcctaacaatcctcaatacttaggtgatttatttagttggtcagctattggggcaagaacgaccgagtctcaaacccatcgtgaaatggcatcaggtttatcaatgcctgttggttttaaaaatggcacagatggtaatttagatacggctattaatgcgatgaaagcggcttctatgccacatcgttttatgggcatcaatcaatcaggacaagtctgtttattacaaacacaaggcaatcctgatggacatgttattttgcgtgggggtaagaaacctaattaccatgaagaagatgtcgcgttatgtgaagctcatatgataaaagcgggattaacaccatcattgatgattgattgtagtcatggtaattcaaataaagattttcgtcgtcaatctgtcgtggttgattcagtgattgagcaaattaaaaaaggtaatcaatcaataacaggaattatgttagaaagccatattaatgaaggcaatcagtcatcagagcagcctcgtagtgagatgaagtacggtgtttctgttactgatgcatgtattagctgggaaaccactgaatcggtgttaagaaatctgcatcagcaaatttcgccagttttagcacagcgtgcagcgcaactaagaaaagttagctaacccaataacactttaataagaagaggcaagcatagatggctgaagaattacaaaatttgcgagagcaaattgatcaggtggataaaacattgctttctttactcgccaaaagaatgcaattggtagcagaagtgggagaagttaaaaatcgccacgggttacctatctatgcaccagatagagaagccgcaatgcttgcttctcgacgtaatgaagcagaaaaaatgggtatttctgctgatttaattgaagatgttttacgtcgagtaatgagagagtcatatagcaaagaaaatgataaaggctttaaaacacttaatccccaattaggcaaaattgtcattgtgggggggaacggaaaaatggggagacttttttctcgtctctttacactttctggctatcaagtggaaagtcttgaagcggatgagtggcaaagtaaatctccggctatttttgcggatgctggtatggtgataatcagtgtcccaatccatttaacggttgatgttattgagcaattaccgcccttgccagaaaattgtttattggtagatttagcctcaatcaagcaagcgcctttagaggcgatgttaaaagcacataatggccctgttttaggactacatccaatgtttggtccagatgtgccaagtttagcaaaacaagttatcgcttattgtgaagggcgagatttatcacattttgagtggttgcttgagcaacttatggtgtggggagcaagagtagaggctattactgcacaagagcacgataaaaatatgagttttatccaagcattgcgacattttactacttttgcatatgggcaacatttggtgaaagagaatgtcgatttagccagtttattaagattatcttctcccatctatcgtttagagctagcgatgattggtaggctctttgctcaagatccacaattatatgccgatattattttatcttcacaagaaaacattaacttgatccgtagatatcatcattcattaggtgaagctatagccttattagatataaacacaaaagatgaatttattggctcatttaataatgtaagtgattggttcggtgattatgcttcacaatttatgaaagagagtggtgcgttattacaaaaagccaatgatagccggatttagtataaatatacataaacgctatacctaatacttatagtaagaaaaacgaatgacaggttatgttattcgttttttattttatatgttatatcttgcgataaatattaccactcatcatcacaagggggccaaacacagcgagtagattgttgagtattgctattatgttgacaatactgattaacagtgctggtatctttgattttattatcccaagtataagcgctagcataaaaagcgaataaacttgatagtataaaaataattaatttcttcattttcttctcctaacgttgataggtataacttaataatctttcggatcggggcatgggcttacggtacagcgagttgaacttatatggtgatctaatgaataggagtaatagccttttcctttatgagcactatcaacgaaattcaaatagctcaaacctagcagtagcatgataattgtatgcatatctattccttacttattcaatattcataatgaataaaccaatatacatttagaaaaaatgaatgaaatttctatttttagcaatcacctaataatgacaacattatattatttttaatttatttgttatgtaattgttgtctatgggtttaattagttaatgataaatgttcaagaatgtcttttctttttaagctatttgttggtgagatcttaaatttgcataaaataattaacggatattaaaactataacaacgatcaaaaaaatacctataacagatgccgtaaattatattggtcgacgttgtttttttgcaaaaagtgctaacgatttaattgtattattttttatttctattccgatgcgttttttaaggggttaatgatggattttataatacaactcgccattatattagtttgtttattttatggagcaaggaaagggggaattgcattaggtctattaggcggagtggggctggttattttagtctttatttttaatttacctccgggtaaaccgcctgtcgatgtgatgttagtgattattgctgtcgtctctgcatctgcaacgttacaagcatcgggtggtttagatgttatgttgcaaatagctgaaaaattattaagaaaaaatccgaagtatatttctattgttgcacctctcgttacctgtaccctgactatattatgtggtactggacatgtggtttataccattttgcctattatctatgatgtatcgattaaaaataatattcgtccagaaagaccgatggcagccagtaccattggttcacaaatgggaattatcgcaagtcccgtatctgttgcggtcgtcaccttagtggcaatgttaggtaatgtcacttttaatggtaagcatcttgaatttttagatttattagcgattaccattccatcaacctttattggtattttagccattgggatttttagctggtttagaggtaaagagttagataaagatcagcgcttccaagattttatttccataccagagaatcatgattacgtttatggtgatactgcaacattgttagataaaaaattaccaatgaaaaattgggtagcaatgtggatattcttaggtgcgattgcggttgttgctgtattaggtgcattttctgaattacgtcccgtatttaataataaaccattatctatggtattagttattcaaatgtttatgttattagcgggcgcttctattattattatttgtaaaactaatccctcacttatttctaaaaatgaagtttttcgctccggtatgatagccattgtggcggtctatggtattgcttggatggcagaaaccatgttctctgcacatatgaaagaaatagaagctgcattaggacaattagttcgtgagtatccttgggcttatgccgttgtcttattacttgtttctaagtttgttaattcacaagccgccgcattagccgcaatagtccccttggctttaggtattggtattgatcctgcctatattgttgcttcagcaccggcgtgttatggctattatattcttcctacttaccccagtgatttagccgctatccaatttgaccgttcaggaacaacacgtataggtcgttttgttattaatcatagctttattttaccgggattaattggtgttactgtttcttgtatttttggctgggtatttgctgctatgtatggttttttataattagctaaattatcctgggaatagagtcataaaagtagaaaagccagataacaataagctatctggcttttggttataaagtagggtaataagctattgtatttcaacgggtacaatattttctgaaggatagcatcctaatactttgagtgaacgagatgtttttgataagtcatgtaatgctttttgcatattgatatcccgtaaattagcttgtacatcaatataaaacatctcttcccaaggtgtaccatttattgggcgagactctaatttagtcataataatgctgtattgttttaaggtaattaaagcatcaactaatgcccctgcttgttgccccgttgccattaaaaaggtggtttttgcaggtacttgttctgatacatcaataggtttacgggcaatcacaataaaacgagtaacattaatttgttgattagctaaattactagcaagtggtgttaaattataaagcgatccgccagcttcactgccaatagcggctacatggggagattgtgctaatgcaactttttccattgccgcagctgtgctttcacaatattcaattttccagtgagggtattgatttaaatagtgactgcactgttggaatggttgtggatggctataaatagtgtgtaattcttctaggctactcttaactgctgttaataaagcatggtttatcggaatacgaatttcgccaacaatcgacagcgaggtggtttgtagtaaatcataaacatcattaattgcaccagagctggtgttttcaataggtagtaaaccgtaatccgcttgtcctgtttctaccagtgtaaaaatatcttcaaatttatggcaagtgcaatcaacaaaagtatcaaaatggcgggctgcatattggcgagcggcaatatgagaataagaacctttagggcctaaataagcaattcttgcagattcatttgcagtcgcattaaggtgttgctgtaaaatggcttgctgcgtgagcaccgaatcttcgatgatcatttggaaaatacggctgatataaaagccatctaatccaacgtttttccctttttcgattaatagttcaagcagttcacgctcacggtttttatctcgaatagggcggtgggtatttaatttaaattgggcaacttcagtcgataattggcgtctttgagctaatagtgaaagtagttcagaatctagcgcagtgattttatctctgattgctaataaatcgagtttttccatgttagtgccctatacttttgtatcgtaccattttaaataaaaaagcctccatttttggaggctattgtcgttcttacttttctttctgaaataaacaaagcctctttaagaatagagtaaaaagaaaaagaagaatggcaaaaaagagtgagtcatcattatatggattgattaactatttaacatatagctatcaaacatgatgatgggtgaggagtcaagaaaaatacaataaaaagcgcatcacgaggatgcgcagaggcgttttgagtcagtgaattattctaatttttaatcaagcttcactacttatatttcatttacgagtaaattttcttcttttaagctattggccgcacgtcgagactcatttttatgctgaactttatttaattgacgttccaattttgccaagagatcattaattgccgcatacatatcaacatgttgtgcgtttgctacaagttgtccattcggagtatgaatacttgcatcaacactaaaaccttttggatccttagtgagaataatatgagggttgattaaatttacctgccatttgttaagtttagttaaacggctttcaatgtgttcacgtagtgctggggtaatgtccatttgtttgctagtgatatttataatcatatagttacctctttattactccatcttggataggttcagaatatcgtgatacacaatttaaaacatgatcaagatcactttttgttagaagtttatataacaagtaatagaaacgtgacaaatgataaatagctgaaaaagagtgcttgtagagtcgtgtttattcgttcatattaagagggttggtctgatgaaaagtaagtttttagcctttgaattagcataaaaaaacagcagcgctaggctgctgtttttgatagtaaaaatgtttaagcagggttggctgcaatcagtgaggcaactttatctgcttcttgagttaagcctagttttttgtaggcattttccatatacacaagcgcttcacgtgtagcttcggtatctggataatcacgcatcatttgttcaactcgattaataaccgcgacataagcccctcgtttggtatagaatttcgcaacagagagttcatatttcgctaaacggtttttaagaaaaacaagacgctttgtggcatctgctgtgtagaggctatcaggatagtagcgaactaactggctaaagtctttgaaagccactcttgcatgctgaggatcacggtctgagcgatcaataccaaagaatccttgtaatgcactatcatctaatgcctgagcggttaacccacgcatatatagaacatagtcaatatttggatgggttgggtttaatcgcataaagcggtcaatagcggaaatcgccattggtaactcagctgatttataataagcataaatcagatcaagctgaacttgttgtgagtaaggaccaaaaggatagcgattatcgagagactccagttgtttgatagccgctccataattgccatctagcaatttttcttggcttgttgcataaagctcagaaggagacatatcagcagttgcgtctttgtctgaactagaacagccagaaagtaacaggcttacagtggccgctgccactaggtatttcatgcgtctcatcacgtattgattatcctctgaataggtttgggagtctctccgtgaagctccctgaaatcggttatactataactcattttaaatgaaacggctgtgccgtcaaaatactaacttaatatagaaactatttatgtctcaacaaatacgacttaatgctacagtcgcagattcacagctgggtcaacgcttagatcaggctttggccgaattgttccctgattattcaagatcacgcataaaagagtggatcttagacaatagagtgcaggttaacgataaaatcatcaataagccaaaagaaaaaatgcttggcggtgaaaaaattgaagtcgatgccttaatcgaagaggatgttcgttgggagcctcagaatattccgttaaatatcgtctatgaagatgatgatattttggtgattaataaaccaagagatcttgttgttcatcccggtgcaggtaatcctgatggcaccgtattaaatgcacttctttatcgttatccagagattgttaatgttccccgcgctggtattgttcatcgtttagataaagatacaacaggtttgatggttgttgcaaaaacagttcctgctcaaactcacttggtagaagcattacagcgtcgcgaaatcacccgtgaatatgaagcggttgcaacaggaaggatgacagcaggagggctggttaatgagccaatttctcgacatcccaccaaacgtacccatatggcagtgcacccaatgggaaaacctgcggtgacgcattatcgtgttatggaacatttccgtgcccatacccgcttacgtttgcgtctagaaaccggtcgaactcaccaaattcgtgtccatatggctcatatccatcatccattaattggtgatcaactgtatggtggtagaccgcgtcctttgaaaggggctagtgaagaatttcgtgagacgttacgtcgctttgaccgacaagcactacatgccacaatgttacgcctttatcatcctattaccggaattgaaatggaatggcatgcaccgttgcctgatgatatggtagaacttattcgcgtactaaaagtggacgcagaacagtttaaagatgaaatggactggtaaatgacctcattgatttatcctgattggccacagcctgacaatattggcgcatgtagcacattaagaactggcggtgtcagtttgccaccttataacagccttaatttaggagcgcatgtgggcgatgatgcgctattggtagaacaaaatagacgtatcatttgtcaacaagctcaattacctgaaatgccattatggttaacacaggttcatggtattgaggtggttaatttggataatcaagacaatcataccgttgaaggcgatgccctttacacctctagtgctaataaggtgtgcgctatcatgaccgcagattgtttacctgtgctatttagtaccattgatggaacggaagttggcgctgcccatggtggatggcgcgggctttaccaaggtgtattacaacagacactcactcaatttaaagcctctaatgagaagattatggcgtggttagggccagcaataggccctaatgcttttgaagtaggggcagaagtccgtctcgcttttgtagaaaaaaatattgcctttgatagcgcatttattccccacaatggcaaatacttagctaatatttatatgttagcgagaataattctgcaggaaagtggggtaaatcagatttatggtggggacttttgtactgttagcgataaatcacgctttttctcctatcgacgtgaacatactaccggacgtatggcctcattaatctggatcaaatagacgctctccaacgtttattcttccttatcccaaatataggcaaatatttttgctcaaaattgtcattttgagcttgaatattgtctaaatgacctcatctattctccagtgataaattttaaatcgaattttacttggaggtgttatgcgtctggataaattaaccaataaattccagcaagctctcgcagacgcccagtcattggcacttgggaacgataatcaatttatagaacccatacatttactgagtgcgttatttaatcaacaaggtggctctattcgcccactattaacatccacaggtgttaatgcctcacaatttaatgaaagaattaatgatgcattatctcgattaccaaaagtggaaggtgctggtggagaagttcacccttcaaacgatttaattaaacatcttaatttatgcgataagttagctcagaaaaaaggtgatgaatttatttcatcagaactttttcttttagctgccatggaaagcggtggtcaggttgctgatatgctaaaagccgccggagctaacaaagccagtttagaattagccattgaaaaaatacgtggtggagaaacagtgaacgatcaaaatgcagaagaccaacgtcaagcattgaaaaaatatactgttgatttaacagaacgagcagaacaaggcaagcttgaccccgttattggacgtgatgaagaaataagaagaacaatccaggtattacaacgtcgtactaaaaataacccagtattaattggtgagcctggtgtaggtaaaaccgcgattgttgaaggtttagctcaacggatcgttaatggagaagttcctgaaggtttaaaaaataaacgtgtgctttcacttgatatggggtctttattagcaggggctaaatatcgtggtgaatttgaagagcgtttaaaagcggtattaaatgatttatctaaacaggaaggtagtgtcattctgtttattgatgaattacatactatggttggtgctggtaaagctgatggtgcgatggatgcagggaacatgttgaaacctgctttggcacgtggtgaattacactgtgtcggcgccactacattagatgagtatcgccaatacattgaaaaagatgcggctttagagcgtcgtttccaaaaagtttatgtggcggagcctacggtagaagataccatcgccattttgcgtggtttaaaagagcgttatgaattgcatcaccatgtacaaattacggatccggcgattgtagcagcagctactttgtctcatcgttatatttctgatcgtatgttgccagataaagcaattgacttaatcgatgaggctggggcaagtctacgtatgcagatggattcaaaaccagaagcattagatagactggatagaagaattattcagctaaaacttgaacagcaagcactgcaaaaagaatctgatgatgcaagtaaaaaacgtttagctatgttaaatgaagaacttgcagaaaaagagaaagagtattctagcttagaagaagagtggaaagcagaaaaagcagagcttactggtactcagcatataaaagcagaattagagcaagcgcgtattgcactagagcaggctcgccgtagtggtgatttggcaaaaatgtcagagatccaatatggtcaaattcctactttagaaaaacaacttgctgaagccaataaaactgaagataagcatatgaaactgttacgtaacaaagtaacagatgctgaaatcgctgaaatcttagcacgttggacaggtatccctgtgtctagaatgttagaaggggagcgtgaaaaactgttaagaatggaacaggaattacatagacgcgttatcggccaagatgaggcggtaaatgcagtctctaacgcaattcgtcgtagccgtgctggattatcagatccaaatcgcccaattggttcgttcttattcttagggccaaccggggttggtaaaactgaattgtgtaaagcgctcgctgatttcttgtttgatagtgatgatgcgatggtgcgtatcgatatgtctgagtttatggagaaacactctgtttcacgtttagtgggggcgcctccaggatatgtgggctatgaagaggggggttacctaacagaagctgttcgtcgccgtccttattctgtcatcttattagatgaggtagaaaaagcgcatcctgatgtgtttaatattttattacaggtattagacgatggccgcttaacagatggacaaggtagaaccgttgatttccgtaataccgtagtcattatgacatcaaacttaggctcggatttaattcaagagcgcttcggtactcttgattatccggcaatgaaaactattgttatggatgttgttggtcaccactttagacctgaatttattaaccgtattgatgaggtagtggtattccatccattaggtaaagagaatattgccgctattgctcaaattcaattacgtcgtttgtatcagcgtttagaagagcgtggttatcacgtgactattacgggagcagcattagaaaaactgggtgaagttggattcgacccaatctatggtgctcgtccattgaaacgtgctatccagcaagaggttgaaaacccattagcgcaagatatattgtcgggtaaattagttccgggtaaagaaattatcttggacttagatgacaatcagatcattgcaaaacagtcataaagtatctttatatatagtagtgatatatagaagatgtcattaaattgaaaaagaggcctgaataggcctcttttttatgcctgcagttttgtgtttttaaaggtaaatgaacagaacaaagagaagagtacctatttgatctattttttgagcaataaatgtttataaatagcgctaaaatcgatgctctgattattaaatatgctgttgaacattttttttcaaaaaactattgccagcctcagaaaactccctataatgcgtcctcgttgtcacggcatagggcgctaagcgaaccggctgagagaacaaaataaaaagtgaaaagcctgataaattagcgcttgacactgaatgaggaagatgtagaatgcacctcctcgcaacaacgcagaagaccggaaacggcagcgacagttgcactgctctttaacaaattatcagacaatctgtgtgggcactcgcagaggcgatatcttctaaaaaattagatgtatcaagtcttgaagagtggctaacaagttaattcatataatgaataagctaagttttcgatttctttgagcatcaaacacttttaattgaagagtttgatcatggctcagattgaacgctggcggcaggcctaacacatgcaagtcgagcggtaacaggagaaagcttgctttcttgctgacgagcggcggacgggtgagtaatgtatggggatctgcccgatagagggggataactactggaaacggtggctaataccgcataatgtctacggaccaaagcaggggctcttcggaccttgcactatcggatgaacccatatgggattagctagtaggtggggtaaaggctcacctaggcgacgatctctagctggtctgagaggatgatcagccacactgggactgagacacggcccagactcctacgggaggcagcagtggggaatattgcacaatgggcgcaagcctgatgcagccatgccgcgtgtatgaagaaggccttagggttgtaaagtactttcagcggggaggaaggtgataaggttaatacccttgtcaattgacgttacccgcagaagaagcaccggctaactccgtgccagcagccgcggtaatacggagggtgcaagcgttaatcggaattactgggcgtaaagcgcacgcaggcggtcaattaagtcagatgtgaaagccccgagcttaacttgggaattgcatctgaaactggttggctagagtcttgtagaggggggtagaattccatgtgtagcggtgaaatgcgtagagatgtggaggaataccggtggcgaaggcggccccctggacaaagactgacgctcaggtgcgaaagcgtggggagcaaacaggattagataccctggtagtccacgctgtaaacgatgtcgatttagaggttgtggtcttgaaccgtggcttctggagctaacgcgttaaatcgaccgcctggggagtacggccgcaaggttaaaactcaaatgaattgacgggggcccgcacaagcggtggagcatgtggtttaattcgatgcaacgcgaagaaccttacctactcttgacatccagcgaatcctttagagatagaggagtgccttcgggaacgctgagacaggtgctgcatggctgtcgtcagctcgtgttgtgaaatgttgggttaagtcccgcaacgagcgcaacccttatcctttgttgccagcacgtaatggtgggaactcaaaggagactgccggtgataaaccggaggaaggtggggatgacgtcaagtcatcatggcccttacgagtagggctacacacgtgctacaatggcagatacaaagagaagcgacctcgcgagagcaagcggaactcataaagtctgtcgtagtccggattggagtctgcaactcgactccatgaagtcggaatcgctagtaatcgtagatcagaatgctacggtgaatacgttcccgggccttgtacacaccgcccgtcacaccatgggagtgggttgcaaaagaagtaggtagcttaaccttcgggagggcgcttaccactttgtgattcatgactggggtgaagtcgtaacaaggtaaccgtaggggaacctgcggttggatcacctccttacctaagagatacgtgttatgtgaagtgctcacacagattgtctgatgaagaacgagcagagataccggtataggcttgtagctcaggtggttagagcgcacccctgataagggtgaggtcggtggttcaagtccactcaggcctaccacttttcctttatgctgtgttgtgaagcaactcgtttacattaagtaaacttcgttactccacgccttgcctaaagaaaaagcttcttattataagaagaaaaaggagtggttatacgggtattaaaacattatggggctatagctcagctgggagagcgcctgccttgcacgcaggaggtcagcggttcgatcccgcttagctccaccataatctcttgaatataaaacaatgattcagagtatattaggaatagtatactgtgaattattatgctctttaacaatctggaacaagctgaaaaattgaaaacaaatcaatatatcaccgaggtatattgatgagtctctcaaaatctcaaactttgaatgtgttttgacatcaaagtgggatgagcgagcaatttacagttcgaggcggacagcgcgcagcaagcgcagcatacttttgtatgtgagcattgcgagcactgcccaacgaagaaatgtaatctgcgcagccatcaccacccagatagtctttgaaagagacactttcgggttgtgaggttaagcgaataagcgtacacggtggatgcctaggcaatcagaggcgatgaaggacgtgctaatctgcgaaaagcgtcggtaaggtgatatgaaccgttatacccgacgatatccgaatggggaaacccagtatccaatggatactatcattaactgaatccataggttaatgaggcgaaccgggagaactgaaacatctcagtaccccgaggaaaagaaatcaaccgagattcccctagtagcggcgagcgaacggggagcagcccagagtcttaatcaatagcagtgtcaggagaacggtctggaaagtccggcagtaaagggtgatagccccgtatctgaagatgctgttattgtgaactcgacgagtagggcgggacacgtgttatcctgtctgaatatggggggaccatcctccaaggctaaatactcctgattgaccgatagtgaaccagtaccgtgagggaaaggcgaaaagaaccccggcgaggggagtgaaaaagaacctgaaaccgtgtacgtacaagcagtaggagccccatcactcaagtgcctcgcactgagtgatgcaagaacatcaccgaaaatagcgccgaatttgctaacaaggttggtcgattttttcaagccgtcgcgcagtgtacctagaagtacacgagcaacggaagttaaaaaatcgggcaagattgaacgcaaaggcaagcgggacatttgaggatggggtgactgcgtaccttttgtataatgggtcagcgacttatattctgtagcaaggttaaccgcataggggagccgtagggaaaccgagtcttaactgggcgaatgagttgcagggtatagacccgaaacccggtgatctatccatgggcaggttgaaggttgggtaacactaactggaggaccgaaccgactaatgttgaaaaattagcggatgacttgtggatgggggtgaaaggccaatcaaaccgggagatagctggttctccccgaaagctatttaggtagcgcctcgtgaactcatcttcgggggtagagcactgtttcgactagggggtcatcccgacttaccaactcgatgcaaactgcgaataccgaagaatgttatcacgggagacacacggcgggtgctaacgtccgtcgtgaagagggaaacaacccagaccgccagctaaggtcccaaagtcatggttaagtgggaaacgaagtgggaaggctcagacagccaggatgttggcttagaagcagccatcatttaaagaaagcgtaatagctcactggtcgagtcggcccgcgcggaagatgtaacggggctaaaccatgcaccgaagctgcggcagcgacacaaagtgttgttgggtaggggagcgttctgtaagcctgcgaaggtgtactgtgaggtatgctggaggtatcagaagtgcgaatgctgacataagtaacgataatgcgggtgaaaaacccgcacgccggaagaccaagggttcctgtccaacgttaatcggggcagggtgagtcgacccctaaggcgaggctgaaaagcgtagtcgatgggaaacgggttaatattcccgtactggtggtaactgcgatgggggaacggagaaggctaggttgtccgggcgacggtcgtcccggttcaagcaggtaggcagagtgattaggcaaatccggtcacttaatgctgagatgtgatgacgaaccaccaaggtggtgaagcaattgatgccccgcttccaggaaaagcctctaagcttcaggttaccaacaatcgtaccccaaaccgacacaggtggtcaggtagagaatactcaggcgcttgagagaactcgggtgaaggaactaggcaaaatggtgccgtaacttcgggagaaggcacgctggcggtaggtaaagtcccttgcggacggcgctgaagccagtcgaagataccagctggctgcaactgtttattaaaaacacagcactgtgcaaacacgaaagtggacgtatacggtgtgacgcctgcccggtgctggaaggttaattgatggggttagcgtaagcgaagctcctgatcgaagccccagtaaacggcggccgtaactataacggtcctaaggtagcgaaattccttgtcgggtaagttccgacctgcacgaatggcgtaatgatggccaggctgtctccacccgagactcagtgaaattgaactcgctgtgaagatgcagtgtacccgcggcaagacggaaagaccccgtgaacctttactatagcttgacactgaacattgagccttgatgtgtaggataggtgggaggctttgaagtgtggacgccagtctgcatggagccaaccttgaaataccaccctttaacgtttgatgttctaacctaggcccataaactgggtcggggaccgtgtctggtgggtagtttgactggggcggtctcctcctaaagagtaacggaggagcacgaaggttggctaagcatggtcggacatcatgcggttagtgcaaaggcataagccagcttgactgcgagagtgacggctcgagcaggtacgaaagtaggtcttagtgatccggtggttctgaatggaagggccatcgctcaacggataaaaggtactccggggataacaggctgataccgcccaagagttcatatcgacggcggtgtttggcacctcgatgtcggctcatcacatcctggggctgaagtaggtcccaagggtatggctgttcgccatttaaagtggtacgcgagctgggtttagaacgtcgtgagacagttcggtccctatctgccgtgggcgttggaagattgagaggggttgctcctagtacgagaggaccggagtgaacgcaccactggtgttcgggttgtcatgccaatggcattgcccggtagctaagtgcggaagagataaccgctgaaagcatctaagcgggaaacttgcctcgagatgagtcttccctgtcgctttaagtgacctaaaggaacgtttaagactaagacgttgataggctgggtgtgtaagcgtagcgatacgttgagctaaccagtactaatgaaccgtgaggcttaacctgacaacaccgaaagtgttttgtcagagagacgaaacgatgaagtcagcttgttcaagattaaattactggcgactcaccgaaaggaaggaagcgagtaatagacagaccagtttgtctggaacaaactggaacagtgcggagcactggccccgaaggggtgagtctcaggatgagacgaataattacagaatttgaagaattctgcttggcggccatagcgcggtggtcccacctgatcccatgccgaactcagaagtgaaacgccgtagcgccgatggtagtgtggggtctccccatgtgagagtagggaactgccaagcattaaataagacgagaaagccaacccaatgggttggcttttttgcgtttgatattttttattctcaattttatcctttaactaaggaaaagagttatttcaattgctgatagagtaaactgccagccgcggctcctgccacatcataagcaaaatcatgccagctccatcctgtaccttgtggtcgactatcataaagctctttagcgacgcctaaacttattgaaaaagataagccaataactaatccttctcgataagaatagttctgatgatctgcgtaagcattagctcctgcggaggctaccatagaaaataaaaaatgctgtgctttatcttttccttgccaattatcattggcaacatgaaaggattgacaaccatttaacgtgacgagtgaaagtaaaactatcagatagaagctattacgctttagtttcatataatatccacgccttattactatatcttgatcgttagatagttgagcttaaatcttaataagttgaagtatagtggattatagcgacaaaaaagccttacttattttaagtaaggcttataaatagtgcttagcagtatagttaaattagagtatacgactaattagtctatcaacacggatacgccgtaaacgtttaattaattttttcacttttagagggtaaaatttaatactctctaattgttgatagcttttaacaattagtgttttttctctgatacaagctaactctttatggcgttgttcatgtaattcatgatgtggatcgtgaattaagatggcattttcaagatctaatccccaagctcgagggtttagattattacctgtaattaattgccactcatcatcaacccacatgccttttaaatggtaggtattatcaccgtctttccaaagccttactgttaattggtcattatcaataaaacgttgaaaacgttgggtgaatttacgaagattaatctcatataaataaggtaaagcaccgattattttaaagggctcttctggcggaatataaaagtcatttgccgttttatcaccaataataatctcaacctgtttaccatttctcagtaaatgactaatttgacgcaccaaaatagcaggtaaattaaaataaggtgtacaaataaccaacttttcttcagtcacggccatgaggtgggagatagtcttattcaagatatttttcttgcctaagccgaccaatggagtcactgttaactgattatttgaggcatttcctttaatatcgtaaccatcatgtgtgcgtaaattaaagcggaattgacggatacaatttttaatttctgcacaacgcactctctcttctgaatcaagacgttgaatagcatctgattgcaaaaggctatcgacaatgaattgcttcattgtgtttgcgagttcagcattatgaatgatgtgatatctgtcataacggtatttatcaagtttatgcaaatagacgttattaatacttgcaccactgtaaataaccgtatcatcaaagataaacccttttagatgtaatacgcctaatgcttcacgtgtattaacaggaataccataaatagggacgtcaacatcaggatgctgttgtgcaactttatgataccaatctgcatttgttgcatcagcagagacacctatacgaccgcgttgagcacgatgccaatcaacaataacggtgatggaaagttcaggacgttgttgttttgcggtataaagtgcttcaaggatctcctcgcccgcttcatcatgttctagatagagtgcggtaataaaaatctctttttgagcttgcgcgatatatttcaataaggtgctgcgaaacgcggatgtctgataaagcgtttcaacatcagcaactgactgagctaatttaggcagttgtgcaaggtgttgttgatgcttagcaagttttagtttagacaacatcacagtgcttatttctcttgtttatgatgactaaaagagtcatcttctatgtaaaaaattctgtaaccgatcttctgatcataacattagttatataggatgtacgcataaaatcatcttatagagtgaatttctcttaggatgtgtgaataatcacattcagaaattttctattcgcgattttatcactatacatcactgagaggatcaagaagcaagttgagattgactattccttcatcaaactgtacttccacagaaaaccctaattttttagctagacttatcatattacgattttcaggcatggtaatggcagttaaccgtttgatgccatgcgccttagtatagttgattaatttcatcattaattggtgacccagtgtattaccttttaaatcagagcgtaccaagatagcaaattcagcctgttgattatcaggatctgccatagctcgagcaacaccaataatttctggatcatcgtgagggtggcgaatggcgacaaaagccatctcacgatcgtaatcaatttgtgtcatattagcgagatcgtcatgggtaaattcgctgatctcactaaaatagcgataatagagatcttctttggtcacttgattaataaaggtttttagtagaggttcatcttcaggcaaaataggtcgaataaaacaaggtttgctatctcttaaaaagaaagtttcttctaattcattgggatacgggcgaatagaaagtttttgatgaggatcgccttcgataggtgacagctccatagccacgtctaacaaagtgaaatcattacccgatactaacaacggatgtatgtcgagcctgacaatttgtggacaatctaatagtaagtgtgaaacttgcaccaaaaaatggcttaagcttaggatattcagtggttgtaatgcacttctaggttggagcttgccactttttattgcattaatgaccagataacgagctagcgccatattaagtggtggcaaagcaacggcagcttttgtttcgatttgccactcaacgcctccttctcctaatagaattagtgggccaaagatggggtcttgttcaatcgcaacacgtagctcttgggagcctgcacggtttgccatactttgtactaatagtccttgaattttcgcttgagggtaaagctcgcttacccgctcgataatggcatgtgcagccgattcaacttcattgctgtctcttaaatataacataaccccctgaacttccgatttatgaggtatatcaggagagcgtaatttcagcgcgaccggataacctattttttctgcaatactgaccgcttcttgtgcattatgagcaatccaagtaggtaaagtattaaagccataggcttccataatgggctggacttggtgtgtatcaaggcgatactgttttttgtcgagagcgtcttcaatacagcgatgggcttgctgggtgttcatttttatttctaaaggtaatgccggcgtttcctttagttgtttttggtttcggcggtactccaccatatgcataaaagcggtaattgcgccttcaggagtgcgataagtgggaatccccgcttcactaaataatttacgtgattgttgagatgaatattcgcctccccaattagtaaatagagtgagccattttcttctggggtgcttattaattgcttcaataactttttgtgctgtttcaatacttggtgcaatagcacttggtgtatgaattaagagtaatgcatcatgatcatggctatctaatagacaattcactgccctaatatagcgctctaccgtggtatcatcacctaaattaagcggattacgaatagcagatgtgtcttgcacaatggcttgcaattgttgctgagtatcagcagataattgtgctaatttgcctgactgtaaaaataattcatctacggccattgccgcaggagcggaaccattgctgatgatcatcagtttctcgccttttaatggcgtcatataactgagggtttcaaccgctgaaaacatctcatgagtatcttgtacgcgtaacagtcctgcgcgttggaaggctgcatcataagctacatcataacttggcgtatcgcctaagagtaattgggctttttgtgttcgaccactttttataactagtattggcttattacgtgatgcactacgtgaggcagacataaagcgccttgcatcatgaatatgctctaaatgcagtaatattgcactggttttactatctcttgctagaaaatccagtaaatcatcaacttggatatcttggttatcacctaatgcaataaaataggaaaagccaatattgcggtaatacgcccaatctaggatggtgttagctactgctgctgattgtgagataaatgccaatttgcctttttttacaggaaggggtgaaaagctggcatttaagccttgccaaggggctaataaacctaaactatttggacctaacaagcgaatatggtattgctggcagagtgtcttaatagcttgaaattgttctgattgtgctgaaagaacaatcacggctttacagcctgattgacctaattgctcaagaagttcaagattgcggcgatgatgagtacagataattgccaagtctggtacttgggggagtttatcaatagaaggataagtaaaaacaccagaaacagaattgcgagtcggattgactggaaagactggcccattaaacccaccactgagtaagtttttcatcattgtggttcctgctctgcctactttgtcagaggcaccaatcaccgcaattgatttaggacgtaatagtgcttcaaggcctcgctggctcatatcaactcctaagtttatgataaactgtattcaatgtagctgatttactcttcttttgcctgacgtctgtctggttttccaattaaatattgttgacgaaagtaactaaaatgagaaaaaagctgttgtgacgctaaatcatcgccgacattggctaaaatagaagcggcaacttcagcggtacaatgttgctcttctcttgctgcttgacggagcatgtagtcacatttactggcttcattaattgaaaacagtggtaatgcatcaaggtaggggcttttacgaaacatttttctcgcctctgtccaagtgccgtctagtaagataaatagcggtggcttactgtttgcaggtaactggtgataaacttttcgcgaaggagaagcatagctgtctgggaagacgacataagcttgtcgatgcggatcattaattgcatcaagtaaggctttttcaggctcggtacgtgaccataaaaaggcaagtgtatcgggtaaaacatcggcaattaattttcctgtattacttggtttcatcacttctgtatcgtacatcattaaacaaaaacggcttttcgcggtttgatgaatgatggtgtcacacagacactgtttttcaggtaataaacaaaaagtgcatcgtttaacacgaaagcctctggctttatatgggcgtgtagagatagaaactcgatattgacgaagtcgagaaaccgcattgtcatgcataacagaaagaccacaatcataaataaaggaatgaatattaccatgatccccaaaggtctactatcagttgttttttatgaaagtttatttaccgtatagtggtaggattattattatttaataaattttggtgacttatgaaggtaacacaaatccttttttgtaataatgaaaatagtattacagataatgaaataaaaaacctatttaatatctttgatactcaggtcattaataatagtagagtggatgttaatcttgagactgccaaaaatcaaataaataaactcgctaatgcagttaggaatggaagctcaaaagatttggattatttagtaaatatcatgtttcatgatgatataaaaataagcttatatgcaactaatcagctctacttgatttatccaaaattaaataactcgataagagaagatattaaagaattagtcaaattactctatgaaataaaaataaaagaggatcaagagtattttaaagaacgacctttattaagtgcaatggcttgtgaggaagcgattgctagacaaaagggaaaaggggagaatgtttttatctcagcggttgataattatttaaatataaaatgtaatgatagcgtattggccaatagtaatgaaagcgtaagtaataataatcgatatatatcttcatctgaattagagtcttgggcgtcatttcaaccctatcagtgtgatattggttcctatgaatcaatacttaaaaaaatagaaaatagcaaaggatccgcggagttaaaaaattatgtggttttagtcaataataaccattgggttgcgttattgacttataaagatagctgttttttatgtgattcattgccctcaagcaaaaaagatgaacgtcataacttattaattgaactagaaaaaaaaggatttaatactatcaatatagaatataatctacaagaaaatgtacctaatggatgtggtcttttggcgcttaattatattgatagtttacataatgaatggaataaatttaatcatgaaaaagaagatgatttaatatccacaatagaaacagtattacaaaaaacaggaaaagactttctaaacctaagttgtggtgagcaaaccacatttaatcatgatgttaggaaaaaattgattatggatacacttttttgtattgttaaatctaatgatgaatagctccattagttattgatataaaagctattttttattaataaaaagctaaatctaattttatttttaaagagagtgttttttgatataggtttatctcttactctgcgtgattctctcggtgacagttgctaaactatcatgtaatctgcgcccctattgcagttggagagactaatgaacgattcttatgaaggtaaaaacggcaaagtaaaagtgatgtatgtccgcagtgaggacagtgccgataataaacctaaaaaaccatcccgccgccctaataatgctcgtggtgatactgaccgtagtcatcgtcgtgatgataaacgcggtgataacaaattttctcgtcgtgatgaacgtggtgcaggtaagtcttcaggacgtaatccatcacgcagtggatcaagctccttacgtgataacgatagtgaaggtggtaattattctccatggaaaacgatttctcgtccgggagatgagccattaaaagagcatgatggaattactggtaaaagccaaatagatcccgaacagcttcgccgtcagcgtttagaagagacgcgtatctatggtgaaaatgcttgtcaggctatgtttaaaaaccgtccagaagccattgttcgagcttggttcttacaagaagtaacacctcgttttcgtgaagcgttaaaatggatggcggcaaatcgtaaagcttaccatgttgttgaagaagaagagatggttaaagcggcgcgtacggatcatcatggtggcgtttgtttcttaatcaaaaaacgtgttggccatgatgcacaaacctatttaaaagatgcaccaacaaaagattgtgtcttagcgcttgaagatgtgggtaatccacataatgtcggtgctattatgcgtagctgtgctcattttggtgtgaaaggcgtcatttctcccgactcatcagtgctagaatctggtgcagcagtacgtaccgcagaaggtggtgccgagtatattcaaggaattgatgctgataattttgctcagacattagagcagtttaaacaggctggctataccttagtgacaacctcaagtcacaaaggaagtgtgccactagcaaaagctcaattacctgaaaaaatggtattaatcttaggtcaagagaaggatggcttaagtgatagcacgttaaaacaaggggatatgagcatttatattggtggtacaggccatattgaaagcttaaatgtctctgtggcttctggcgtgttattggctgaatggtggcgtcaacatcacggctaattatttaattgttagatgatttaaaaatcccgctgaataatgaactgcagtcagttcaccatgttcagcgggatttttctttaattaactaatcaattcattaatggttatttacccggtgagaatggcggtttagcaaaccaaacaaccaccagcattaaaatgaatattcctgccgctagccagaaaatttcattcgctgaaataatcagaccttgttcagtgattgttttagctaaataagccgaggtttgttcatcagaaagccccaattctctcatctgttgaaaagccaattgtgcatcgggatcgagtggattaattttttcaacaaaggtttcatgatgtaatgactccctttgtgtccaaattgttgtcgttaatgacgcgccaattgcacccgctaaggttcttaaaaaattagataaactggatgccgaggccattttctccggaggtaatcccgataaagtcatcgtggttaatggcataaagaaacatgctacacctaaaccttgccagaattgtggccaagcaactgtggcaaaatccattccgggttcaaaagtataagctcgccaataaaaacataccgcaaacataataaagctaaagctaatgatatagcgtaagtcgacttttccaccaaattttccgatgattggtgtaatgatcagcggtaataaaccaacagaggctgcagctaaacccgcccatgttgcggtataaccaaagacttcttgcaacaggagagggagcaacacaatagtaccgaaatagatcatataagcgagactaagggttaaacagccaatagtgaaattgcgacttttaaacagagaaagatcaataacagggtgttcgtcagttaactcccacacaattaagaaacttaacgccactacagcaataatagtaagtacaataatttcagttgaattaaaccaatccagctctttaccttgatcaagcatgatctgtagtgcaccaacaccaaccaccaatagtacgagaccaatggtatctattggtttaatttccgttttggtttcgcgacccgctaatgtatttgagatgcacataataattaacacaccaaaaggtacgttaataaagaagatccatccccaatggtaattatcactgatatagccacctaaaatagggcctaaaataggtgcaacgacaatggtaaccgaccataacgctaatgccatattgcgttttgctggtggatagttattcaatagcaaactttgtgataacggaattaaggggcctgcgactaaaccttgaagtacacggaaaaagatcagcatttctaaactttgagaaataccacacagccatgatgttaaggcaaatagtgctgttgaccacataaagaggcgtacttcaccaatacgttttgccagccagccagtaataggaattgagatagcatttgcaacaccaaatgaggtaataacccaagtgccttgagaatttgatgcacctaagttacccgctattgtcgggatggctacgttagcgattgttgaatcgagaacttgcataaaagtggccagcgcaagtgcgatggtcattatagcaagttttcctccttgtaagggttctttaatcacctttacacctcgctttatcatcctgcattttgttcaatgatttcattaatcaatgaattgatttctgacatatcaatagtgagtgcatcagtatgataagccggtgcttgacgttcgctctgtgataatacttttccatcaagattaacggtatccacagtcacttcagtggataaaccgatacgtagcggtttttctgcaacttctttttcatcaagggaaatacgtaccggcaagcgctgaactacttttatccagttaccactggcattttgtgccggtaatagtgagaatgcactgcctgttcccatatctaatccctgtacacgaccatggtaaataacttttttaccataaaaatcagtggttattttcgcgggctgtccgatacgcatattggccagttgcgtctctttaaagttagcgtctatccacatacctgtgacaggtacgacggccattaacggtttacccggtgcaacttgtgcaccaacttgaacgctacgacgtgagacataaccttcagcaggacttagtatttttgttcgttgtaaagctagccatgcattacgcacttctgttgcagcttgtaatacagaaggttgttgtgcaataggcgtggttaagataatggcttgattagcattatattgctcttttgctacatctaatgccgcttttgccgtggcaacagcttctcttgcatgttggagttcttcttttccaatgacatttcgctcgcctaatacttctctacgacgcagatcattttgcaattttgccaattcagtttcacgtaaaacaatattcgcttttaattgacgaccattgatgatttgctgatgcatttgacggacactatttgctaaagcggtttttgctttatctaatgcaagtatttcatcactatcatctaattggactagcggttcacctgcttttacgtagtctgtattgtccacatagacagtcgttaccgagcctgaaatttgtggcataaccataatttgattgcctgttacgtaggcattatctgtggtttcatgatgtctaagaaccataaaccagtaagcggtataagcgagccccgcgagaataaagataaaagtcagtagcaataaaacatttcggcgagttcgttttttattgcgaatgggagcctgaggtggatttttttcctcatttacactcatttagaagatctccataaaccagaaaaaagcattatatatgtttccagaataaaatccggaaacatatatattgggcttatattagaataataattagcacgaaaggccaattataaatgtgaatgaatatatttgtttatcaattcatgttgtaaatgaggttggcggtatttggtcaggatatcgcaatgcctcttgctcttaggctacgtttactagatgtaatggtatctagtaaacggagtctactttcgcacaaatgagtggcgagtagttctacggctttgtccgtatctctcgaacgaagtgcgacaaatatttcacgatgctcatcccacgctggattagacggcgctctatcaagccatcgtgctcgcgaaagcctacgtagggcatcatttatcccttcaataataaatgcgttattacaaaggcgtgccaactctctatggaatcgtgttccagcattttccatgctctcttctggtgaatctaccgtggtttctttaagcaggcgttccaaattgttcaactgttcttcggtgatctggctgactgaaagttttaatgctgctacctccagtatttctcggtaaatacataattgttcgatttcatcggcatcgattggtgccactaaccaacgtataccatcacgacatataagtccctctgattccaacttttgtaatgcggctcgaacgggagttctcgatgcgttaaatttcgcttcagcccagcgttcagttaaccgttctcctgggcctagttccatgttgagtatcagttttcttaattgtttttcaacctctaacacttggctcataacggcaatactctcctaaaaattgacagtaaaataaattatctatatggtataccaaattggtataccagaaaagaatgtttctatgactcaattatataacagcttttggcgtcgaaatctgctcgtttgctttattggttctttttcaactgtttttgcaatgaccttgatgttaccgttcctccccctatatgttgaagagcttggtgttcaaggtcacgccgccattgtccaatggtctggcgtggcattcagtgcaacgtttatcactgctggcttaattgctccagtatggggaaagctcggtgacaaatatggacgtaaatcgatgctcgtaagagccagtcttggtatggcggtgaccgtctcacttatgggaatggtaacaaatatttggcaacttgtcggtctaaggctattagttggtttggcggggggatactcatctggagcaactattcttattgcagtacaagctccaagagagcgtgttgcttgggcgttgggcattgtttcatgtggtgtaatggcgggtaatcttattggccctctagctggaggttggttacctgacttgttcggtattcgaaacacgtttttctgtgccggtgcactgatctttttgtcctttatcatgacccttacgcttatccgtgaagatacgccgaaatacataaatactacgacaaaaatgcaagtgagttggtcgcagttaccagcacgatttgtgatagttagcatgctttgtacggggttgttgctgatgctggccaatatgtcgatagaacctattattacagtttatgtgcgtacactcgttaatgatcctgctcagataactagggttgcaggttatgtcatggccgctgctgccttaggtagtattatttcagcctcttggcttgggaaattagcagataggatagggcatttgcgtattatcacgctggcactagctatagccggtttattgctgatccctcaggcctttgttacctctggttggcaacttattattttacgttttcttatgggattagcattggggggattgttgccttgtattgcggcagtaatacgtcatcacgttccagaaggaatgataggcagtatccttggctattcggtcgcagcccagtttgcaggtcagttcatcggcccgttaataggtggcgttattggtggtcatataggtatgcgcgcagtttttctggcaactagtgttgtcttattgttgggagccgcttggaattttaaattacatcgtaattcagttatacgctgatgaacttcgttcttcttcacctgtatatttcggagattttatgacaacacaattcaacaataacaataataatatcgataaaaatagtgctctgctggtaatggattttcagacgaccattcttaataattttcttccacaagatcgtgctgaagatgttattcgtaatacatcatcattaatttccgctacgcgtgcagcaggcataccgattatctatgttagtgttgagtttcgtgaggggtatcctgaggttagtcaaaacaatataattttctcatcgattaaagacaatggaatattaatcaccaatagtgaaagttccgctattcatgatgatatttttccgcaggaaaatgaaatcgttattattaaacgtagagtgggggctttttcatttactgagcttgagatggttcttcgtacacaaggtattgaaaccttgatccttgcaggagtcacgaccagtggcgtgattttatctacagttagtcaggcatttgacctagattatcgtctagtgattgtaagtgattgttgtgccgatcctgatcatgacacacatgtttttttactcgagaaaatcttgtctcaacatgctgttgtaaccagttcatctgaaatatcaaaatattgggtataaatagactaagtagccaatgttacatagatcttgtcggtagtatgatagattaaatatcagacatgattgagtgcaagggctggggaatattggcttttggcacagagcgacctgtcagatttatgttagctctgtgccatagctagtcaggtcaaatctgagctaatacagattagatcaataagtttattgatagtgatggttattcctgctgattatccgctaatgtatcaagttgtaataataatttacgcattagggtttctagctgtttttgttcaccttcatctaatactgaccaaattttctttaaacattcgtgctgtggtggtaataagctatttaaaaactcttctccagcatcagttaaatgaagatgtagacagcgacggtcattatgactttcacgacgctcaatccatccttgtttttctaattcatctgcaatacgagtggcatttgttcttgatgagcctaacgccgcactcaattctgatggttgaatactacgattttccgttgtatctaaaatcataagtgccataaataatgtctcgttaatgccctgagactttaacatattattacgactttcaagaagtttgctctggacgtgcatagacaggcgagttaacaaaatttcttggtaaggaatatctttgttaagcgatttctgttgtgtagcgcgagtgtttagtagttcttctgttggcgtaaatgagctttccatttttagacaccttgttagtttcgataattaggataacgttgttatcaacatgttaaatggtatattaaacacacaatttagcaatttttattatttatagtcactatgtttttttgattatgctacctgattcataaattttttgaatgataacataaaaaaatcactaggtgcttatctatttacaataagttataaaaatcaatttatcccttatttacttatgaataatagtctatttaggaaaaaatggatcgatttctacgataaaacacgtaataaatttattttacactataatgattctattgttaataataccacttagaaactatgccgtttatgctatattgatataattgatatgtatttcttaataaagaatgagatgatgatatacataaatagtaatcacgctgttaaaacatttacgttttgttctgtttagaggggtattgctgacataaaataccccttttgagataagttttattattcagattggatcactggatcatttttataaccaaataaccaaaccagtaaacctaataagccaatgattgcaccggcgctggaaacaccaatccagccatattggtgataagcgtaacccgataataaagagcctagggcgcccccgataaaatagctagtcatataagcggcagtaagccgatttcgggcatcaggtaaaatacggtagatagtgctttggttagtgacatgaacaccttgaacggctaaatctaataaaaccacaccaataataaaactaatcagtccaatccattgataataaggggcgataacaataagtccccaacaaatgaagagaagaattaaacctgaagtagtcgtttttttacctttgcctttatcaacccatacacccgctttacctgccattagtgctcccgcagcaccgacaagtccaaacaagccaataactgcatcggaataattaaagggatcagaagcgagtaaaaaagccattgatgtccacagtaaaccaaagtgggcaaagataagtgcaccaatcagtgagcgggtacgtaatactggggtcgtggcaaacaatttaaaaatagaaccgagcagttgaaaataatttaaatttgtttgacttttataggtaggtaaacagcgccatagtgtaatagctaaaatagctagaaaaacacttgctagccagaaaatgccctgccaattagtaaaggaagccatcagccctgacgctgttcttgccagtaaaataccaagtaaaagcccactcataatagtacctaccgcttttcctcgttgatgaggtgcagcaagtgtagcggcaaaaggaaccagaatttgggcgacgaccgagaacatacctgatagggcagtaccaattaacataagccaaatattaggtgccattgccgtaattaataagccgctcgctgaaatcagcgtcatgataacaatcagtgaacgacgttcaaaaatatcgccaaggggaaccaatagcattaaacctaaggcataacttaattgtgctgtagtgacaataaagccagctaaagtggcagagatatgaaaataatttgcaattgaatcaagtagcggttgtgcataatagttacttgcgacaaccatgccagtggcaacggccataagtaaaataaggcctttactaagagaggtttgtggtgctgtgttttccataatactgatcacaaattatttgtaaggtaaatgatagtaacatgagtcatttttttgcggaaagaattactgtgatagcaatgttcaatcaatcgggcatgaaagtttttaatctatttttataatagattaatattaaaagtaaaatgtgatttattctcggcagataaccgaatatttgcattatttattatgctaaatagatgaatagccccattccctcactgtcctgattagacaagtactaatccatatagtaaccaatgttattagttaattatatcattaatattaaattatttagttattctgttttaaatatagctcatttttagtttagttaacttttttatggtttagatcaaaaaaagctatgtaatgataataattatcattaacatgattgtgttgttaaatgtatttttagctatttatttgcgtattaataaccatataaaagatactattatgaactttttgttaattaagcatgagcctcattttcagggaatgggggccgtttcattttcatctcatgcgatttttttattactcactacacttgcttcgtttaatagcgttgcttcacaaagcacagaaaaagcatcacagactcaacaatctgaaactgtggtgcttgatcctatttatgtttccggaaaattaaattcgagtgttgaagcaggaagcacggctttgacattaaaagatatcaatagaattcagccaaataatatcgctgaattggtagataaattaccagggatttcttcatctggctcgccaagacctggtgggcaaactttaaatatttggggaatgggcaatccggaagatgtgaaaatcactcttgatggtacaccgaagacgtttgaaaaatatcgtcaaggttccatatttatcgatcctgaattaattaaacgccttgatgtcgataaaggaccacataatatcacccaaggaaatggaggatttggtggctccgtacggattgaaacgaaagatccggatgacttactgttacctgatcagcatattggtatgtttttaaaatatggacatcataccaatgataggcaaaatcgttatagtggtgcgatatatggcaagctaatggatggaacggctgacggtctattttattttaatcgtcgtaaaagcgatgatttacgtcgtcctgatggcactaaatttggttattcacaatcagatcaagattcgtttttaattaaaaccaatgtctatttaacagacgcacaaacattaactttatcagcatcaagatctgtcagtgatggctggacgccttgggctgccaagcgagatgaactggcaaaaccgagtcaatatgatgttgataaatatggttttgatggagcgatgaaacgtaagttagtttatcgtgaccaaaaagatgacactgtgagtgtgaaatggaatattcagccaattgattctgacctgattaatttcacattgacttatggttattcaaataccaaacagaatgataaacgccctgataatgcgagttcttatctaagtagtagtatgggtaaccaaagttgggttaactataaaaatcatcaaattgaagtgaaaaatgaaagtaccgtgatgcaaggagctaccgaacatgtgattttagtaggagcgcgttggcaccgtaatgatcgtaatgtgttaatgtttacgcgggataaagcgaaaaatccaaattataattatggctattatgcaccaccttatatgccagaagggacgcaaacaaccacgagtttttatcttcaagattcaattagttatcgaacactaaccctcacgcctggtgtgcgttatgatatagtgaaaaatcaaggagcagggagtcgagcgaaggtttatcaagatcctaatccctattacggtcatgattatagtgatgtaacttatcgtggcattacacctcatttgggtattttatggaaagcgacccccaatattagattttttggtgatataactcatacatggcgtgcgccgttaattgatgaacaatatgaagtgcaagccagtatctctagtttgacaggcacgagtcgccatttagataaagagaccgttaccgcaacacggattggcgccattgttgattttgaaaatgttttccaacaagaagatcagctgcaacttcgaagcacattttttgatactcgtgggaaagatgagatattccgtcgtcgcggtgtctattgtgaaagcggaaaagtaaccggaaacaatggaagttgtcctccttcccttggaaattatcgcaatttacctggctaccatattcaaggtatggaaatagaggcattttatgacagtactaatctctttggtcgcttagcgtattcgacaatgaaaggtaaacgcgatcaatctcctcgtgatccgtggtttggacaaaaaacatggattgcagaaattcaaccggatgcattacatgccacccttggaatgaaaatcccacaaataaatatggttgcagggtggacaggggactttattggcgctcaacgtcgttcaccgatggatgctgatccggctgctacttattggtcattaccaaaaagtaaaggctatgccattcatggactattcgctaattggaaacctgcttttatcgataataccgagatacgttttactgtcgccaatttatttaaccgtgattattacccttatttaggtgagtcggtatctggtactgggcgagattatcgctttactgtggttaaaagtttttagttagacaacaggacaacagccataagataaaaaaaagcagagcatattaataatgctctgctttgacgttatttaaggattatcactattaattagccgctttacgcgcttcttctacccagccatcaaaggttttttgatgtgctttgatccacgcgttagcatgacgttcaatatctgcttgtgatttttgaccattatgcatacgtaagttttgggcgttgatatcagccactgaaactttcattatttcaaataatttagcagcagcagggttggcttcggcccattttttatttgccgcgatatgcattgtactcggtgggaaaccgtagtttttaccgtttggtaaggttgtatcggttttgtcatctcccggtaatgaagagaagggaacttgtagccaaacgacatctttacccggctttaatacatcacttatccagtatggtgtccaagtataatagaagataggtttaccttctttataacgagtaatggtatctgccatcattgccgcatagttaccctgattatgggtgactgatttctctaaatcataggcttttaagtgattattaatggcttcttcacaaccccagccagggttacaaccggttaaatctgcttttccatcaccattggcatcaaataatttggcaattttcggatctttaaattgctctatattagtgatgttatatttttcagccgtttttttatcgattaagtaaccttgggctgcattaaccacataatcacctttacgataaaatgtgttatcgccacctgcggcttcatattgtgagttatgcaaaggtacccaactaaccgccataaaagtggcatcaccattagcaatagaagaataagctacgttgtagtcaacttctttaatgggttgcactgtgtagccgagtttttcgagtgctttattgacaatgagtgtctgaaaagtttcttcagaaatagtactttgtaccggttgaaccgaaacccctttaccgggtaaatcagcagcggataactgagtgcttatcagtgtggcggacaatactgttgcccagagaactggattacgcatagtttttccttctgttgtgatgggtaagagataatagtcgctgtgtcgtgctactgttatctcttatattaattgaataaatatgtttgattgttagttaatcttattgccagtatgagttatgcggcttttttaccaaacaggcggcagatcaaaccaatcgggcctgtcatataccagcgtctattacctttcaggcgactattttggcctaaagattgagttaagcggtcaagaataatcgcgaggatcacaataccggcaccacctacagccgctaatcccatatctaggcgaccaataccacgtaataccatttgacctaaaccaccaacggctatcattgatgcgataacaaccattgacagtgctaacattaaggtttggttgaccccagccataatcgttggcattgccagcggtaattgtactttaaacaacatttgtcgaggatttgccccaaatgattgagccgcttcaatgagatcttccggtacttgtttgatacctaaaatagttaatcgcactatcggtggtaaggcgaaaataatcgtgacaactacaccgggtacgttaccaatcccgaataacatcacgataggtactaagtaaacgaaagcgggggttgtttgcatggcatctaaaagtggtctgacaatttttgatgctctgtcactatgtgcaagccatatccctaaggggagaccaataatcaggcagaatagtaatgaggtcagcactaatgcaagggttatcatcgcttcagaccatgcaccaatagcaccgattaagatcagtgaaataaaagcgcttattcccatcaccttacctgaaagttgccatgcaatcagtgaaaataaaataatcgcaacaggtgcaggcattgaggtaagaaagttttcaaagccacctaatactaaatcgactggaacgcgtatcccttggaaaataggacgaaaatgcagcacaatccagtcaataccatccgttacccaagaatctagtgggatcagcgtatgattaaatggatccataatattaaagtgatcaggtgtactttctgttggcatggcatctagccaatcagtaccagaagagagatcactgccgtcagtgccactccctgtaccccaaggatcagcatcagctccaccggtatcaccgccagcgctactactccaagggtcggtatcagtagtgttgctatccgtggttgcccaaggatcattgtctgtatctgtgttgttatgcgtttcttgcgctgaattttgtgttgtattggcgttttctgttgccgcttcttgagtgtccgtttcccaaggattggcttggttatttgtcttactcatttggtgtctccttatccagtgcttgtaacaacattcctttcgaaattaaaccgatataacggtttttttcatcaataacagggatcgcacagggagattgcgcaacagtagaaatcagttcatttaatggtgtatcaccattaatcgcacaaggttcagttaaaatagcggatccaataggttgcttcgcttttaatgcttcttcaagagaagtgacagaaacaatacctgcaaatttccgtcctcgctcaattaaataaccaaagtttctatcttcatcttccagtacttttaatgctgaacggggaccaaaacctggcgcaatatgcagtagtgtttctgggcgacgtttagcaatatctttagcgctaaatacatgactgatatcaacgccacggaagaaggtacgtacataatcattggctgggttattaagaatttcatcaggggtaccgatttgtaccaccacaccgccttgcataatcgcgatacgatcaccaatacgcatggcttcatccagatcatgagaaataaacacaatggtgcgttgtttatcaccttgtaagctcaataactcatcttgcatttctgttcggattaatgggtcaagtgcggagaatgcctcatccattaataagatatcaggatcattggccagtgcacgagcaagcccaatacgttgtcgcatcccaccggataactcatccggccaagattgagcatgagagcttaagttaacttgctctaatgctgccatggctttttcatagcgctcttctttgctaatgcctgcaagctccataccaaatgctgtattatcgagtacattcatatgaggcattaaagcgaatgattgaaacaccatactgatttttttacgtcgaacttgtcgtaaatctttatcagacatggtggtgatgttttcaccatcaataaggacttcgcctttagtgggatctatcagacgattgagaaggcgcactaatgtagatttaccagagcctgataatcccatgatgacaaatatttcgccttcttcaatggccagattggcattttgcacaccaacggttaaccctgttttatcaaagatttggtctttgttcataccagatcctaataattcaaaggcccgtttagggtgctcaccaaatattttatataggttttttacttcgagtttaattgccatgcaatatctattttcctatttaaatatgaaaggaataaattaaatgttaataaattagtttgttgtttttcctaaattgagatttttagtaggggaattaccctatcataatgaacaagcctgacaaccctatgttaattataattaaacaaataattttgtgatttttttaggttttttttgataattaatatttaaataaagtaaaattatagaaaagaaagaagtcaaaaaaaccatactaactgtatgaaataacattatttttattcagatgttaattttaattatcatcacaatagaaataacaacaaaataaaaaaatgtaaaaagatactgataaaataaaaatagaaaaaaatgcattaacattaaaaaatcttatgttttttgaggggtgatcttaagttatcgataactagtcataaaaatcattcgtaaaaaattgataattctggttaatggaacggtaaaaattacacaatcaggttgtttttcaagcaaataaaaaggcactaaaaaataagttttatttttcagtgcattatattaattgattaattcataattaatatgaatgtattctgttttttgctgtagagggttagctagaaatcccagtcatcatcttcggtattgatcgttttaccaataacataagaagagcctgagccagaaaagaaatcatgattttcatttgcatctggcgatagtgatgaaagtattgctggactaacattagttatttcatctggaaatagtgcttcataacctaaattcatcagcgctttattcgcattataatgaaggaatttttttacatcttctgtccaaccgacagagtcgtagagatcttctgtatatttaacttcattatcatataaatctaataataatgagaaagcaaagtctttaatattttgtttctctaatgatgatttatttaataactgattttggaatttatagccaatataataaccatgcacagcttcgtcacgaataattaaacgaattaagtcggctgtattggttaatttccctcgacttgaccaatacattggtaaataaaatccagaatagaataaaaaagactctaaaaatacactggcaatttttttctttaatggatcactatcttgataataacgcagaataatatctgatttcttttgcaaataggtattttcttcactccaacgataagcatcatcaacatctgttgttaagcagagtgtcgaaaatatcgagctataagagcgagcatgtaccgcttccataaaacagatattcgataataccgcctcttcatgaggagtctgagcatcaggcattaaggttggtgccccgaccgtattttgtatcgtatcgagcagtgtaagccctgtaaatacacggatagtcaactgtttttcagcttgggttaaggtattccatgaaggtatatcattagaaagtggaattttttcgggtaaccaaaaattcatggttaaacggttccaaacttctaaatctttttcgtcttcaatacgattccaatttatcgcattaacacgacttaaataagatgcagacatagtaacactttccttatcattattattaaagggcgcatgaaacacagccttttatttctgtgccggctaatgctgtttgtctaatacgaatgtaatacaaggtctttatacctttacgccatgcataaatttgtgctttattaacatcccttgtggttgcttcatcagaaaagaataatgttagcgacaatccttggtcgatatgttgtgatgcttgggcataggtatcgataattttttctgcgccaatttcataagcatcttgataaaaatgacggttttcattggtcataaaaggggcggggtaataaacccgaccgattttaccttcttttcttatttcaatcggtgccacaatggggtgaatactcgatgtagagtgattgatataagagattgatcctgttggtggtattgcttgtaagttttgattataaataccgtgagtcataatcgagagcttaagtttttgccaatcttcttgggttggaatatgaatattggattggctaaatagctggtggactttttgggttttaggtaaccactgttttgataaatatttatcaaaatactccccagtggcatattttgactgttcaaaccctttaaagcgctgtttagtctctatcgctaattggttagaggctaaaagggcatagtatgttacggtatagaaatagatattggtaaaatcaagtccttcttctgaaccataataaatcccttcacgggctaaataaccatgtaagttcatttgccctaagccaatggcatgagatgcttggttgcctttttcaatagaaggtactgattctattttagtcatttgtgccacactcgtcagtgctctgatggcaacatttacggtatgcgcaaaatctggtgagtccatcgccatggcgatattcattgatccgagattacagctaatatcatgaccaatttgtcgataacttaaatcaggattgtattcactggcactatttacttgtaagatttctgagcataaattgctcatattaattcggcccgcaatcggatttgcgcgattgacggtatcttcaaacataatatagggataacctgattcaaattgaatttcagctaaagtttgaaaaaatgcccgtgctttaatttttttcttacgtatctctgcattgttgaccatttcagtatatttttcgctaatactgatttctgacataggaacgccatatactcgttctacatcataaggtgaaaatagatacatatcttcgttgcgtttagctaattcaaaggtaatgtcgggaataacgacacctaatgaaagcgtcttaatacgtattttttcatcagcattttctcgttttgtatctagaaaatgatagatatcaggatgatgagcatggagataaaccgctccagcaccttgtcttgcgcctaattgattggcatatgagaaggcatcttcaagcattttcatcaccggtactacgccagacgattggttttcaatgcgttttatgggggctcctgcttctcgtaaattagtcagtaagaaagcaacacctccgccacgtttcgacaattgcaacgcagaattgactgctcggccaatggactccatgttgtcttcgatacgtaataaaaaacaagagaccaattcgccacgctgtttttttccacaatttaagaaagtaggggttgcaggctggaaacggccactaattatctcatcgacaaggtgagtggcgagtttggtattcccctgtgctagggttaaggcaaccatacaaacacgatcttcatagcgttcgagataacgctcaccatcaaaggtttttaaggtgtaactggtgtagtatttaaatgcacctaggaacgattgaaagcgaaattttttgctataggcatgcttaaaaagctgtttgataaacgggaaatcgtactgctctaatacttgtgcttcgtagtagtgttgttgcaccagaaaatcgagcttttcttttagatcatgaaaaaacaccgtattttgattaacgtgttgacgaaaaaaatggtgggtggctaatttgtctttatcaaactggatattgccttgctcatcatagagattgagcatggcatttaaggcgtgataatcgagttgttctatagagtgggtcatattttttatctcattcactttttagtcattatttgctagctgaccaaaatgtgcttaatccggtttttacacgtttaacatcttcaggcgtaccaagtaactcaaaacgatagagaaaagggacttggcatttttgtgcaataatgtcacctgctaagccgtaagcagagccaaaattggtatttcctgaagcaataacaccgcgtattaattggcgattttcaggaatatttaaaaactggatcaccgctttaggcactgcgcctttaacgccaccgccaccataagttgggcagagcaacacaaaaggttgtgtggcttgtagtggttcatcctcttttatccttgtcgcttgtagattaagtttttgtacgaagcggtgacaattttctgagcgactagagaaataaattaaaggggcagtcgattgcataagttgctcctttagcgcgctatttgacgaattttatctgggcagaagccagaccaatgttcgtcaccattaacgacaactggtacttggcgatatcccatagaaactatttttgctaatgcttgagtgtcttgggtgagatcaaccgcagtgaaaggaattttttgttgttgtaatgcgcgctcggttgcactgcattgaacacaatttggtttggtatagaggatcacagacatagaataacccttataaaaatgtgaatgtgtctgctcacagtcacaatgaaaagtacttaaatactatatataggtttattctttttcaaccacactagatatggtgttttttatttttgataatgattattattaaaattaagcagttagcagatttattttattttcttatcgctcatttgagcaatttttattaggtatagtagaaaattagatgattgatttacttacaaagcatgttttaatcttgatgatacagacaaatcaatagagaacacattatgtaccaagattatctcaatacgccgaaaggttttccaaagccttatatatccattactgcagatgatgatggcatcaccagccttaactttgttagtgaaaaagaggcgttagttaattcaaatgccataattgacctgtgtataaaacagttaaaagagtatttttcgggtaaacgcaccctattttcagtgccactagcgcctaaaggaaccgaatttcaaatacgcgtttggcagactttacagtctattccttatggtgaaatttggagttataaaaagttggcacttacattaggttccgtcaactattgcagagcggtaggaatggcaaattcacgtaacccaatctcgttaattattccttgccatcgcgtcattggtcataatggtaagttagtaggctatactgggggacttgatatcaaacgttggctattacactatgaaaaagtggatattgacgaatagttcatattgtaagtattaagcactatttcttaagtgattaatggcttaagttatgggatttgtctgaataataatcgtttaacagaaaaaaaatacgcgtttcgtgatctagactgtggacagcgaatcatcatttttgttttactatagccaacgcaaaacgcttgcgtttattttctattttaaaggtaaacttgatgtctaaattaaaaggtaacgttaagtggtttaacgaaactaaaggttttggttttatcactccagaagatggcagtaaagatgtgttcgtccacttttccgctattgtttcagaaggttttaaaacacttgctgaaggtcaaaaggtagagtttgaagttactgacggcgcgaaagggccatctgctgcaaacgttgtcgctatctaattaacgacttctccaaaagtaaaaaacgtttttgaaatgacccccaatagttggacaaccaattattgggggtctttttatgtcaaatacaggggggatttaaacatcatcattgctacttagggtgactatgcttgccacactgcataactctcgctcgttttgatgatgaaaaaagacttgagaaatttaaagaggagcttgcgtatctagctgcgggataaataccgtggttgaaagttttttaaattattaaaatcaagaatacatcatagctatcattttaaaatatcaatgaatgtattgataaaattggctaatttattgagtaataccaccgggaacaaaatcaaattaaaaggcctgacattggttgaatattaagttcaggccttataaatcgcttaactaaaagagtacaactttatgattaacggtttttatcttgttaaagagactacatttcacggagtagccagaatgcgaatgccgtcatcagaaacgagcccgctaagtttgcccccatggtgcctaatgcccagcctattcgtccttcattaaataaggcgaccacctcaacggaaaaagtagaaaaggtggttaagccaccacaaaaacctgtggtaagcatgattttccaaataggatcaatattgggagccttactaaaccaagcaatgccaaaggcgataataaaggcaccaatacagttagcgaccaaggtccccgttgcaaaatggggaaaaagagaattgaggcggtagctaattagccagcgtagtacgctacctaaaccaccgccgataaatacagctattgcaatgttaagcataagagagattaatcgttatttaacctcaatcccttgagcttgaagatcagcatgataagacgaacgaacaaatggtccacaagcggcgtgggtaaagcccattgctaatgcttgctctttcatatattcaaactcgtcaggactgacgtagcgttgaacaggaagatggtgacgactgggttgtaaatattgccctaatgtcagcatcgttacaccatgtttacgcagatcgcgcatcacgtcaataatttcttcatttgtttcacctaaaccgaccattaaccccgatttagttggaatatttgggtgggcttgtttaaagcgttctagtaacgttagagaccattgatagttcgcaccaggacgcacttgacgataaacacgaggtacgttttctaaattgtggttaaagacgtctggtggtgtgtcagtgaggatctctaatgctttatccatacgaccacggaaatcagggactaaagtttcgatgcgaatattaggatttttttcacggatagcggtaatacaatcggcaaaatgttgtgcaccaccatcgcgtaggtcatcgcgatctactgaggtgataacaacataacgtaatcccatatcttttatcgtttgggctaatttaattggctcttggggatcgggtgcgttaggacgaccatgagcaacgtcgcaaaatgggcaacgacgcgtacagattgcccctaagatcataaaggttgcggtaccgtggttaaaacattctgcaagattagggcatgaagcctcttcacaaacagaatgcaggccatttttacgcatggccgctttaataccttgaattttacttgaatctgcgggcaactttattttcatccactcaggtttgcgtagcagttcttcacgttctgtaacgattgttttaacaggaataagtgccattttatcggcgtcacgatattttacgccgcgttccatctgaataggtttactcataattgtgccagttccagttatctagggtgattaacacgatgtgactgaggtaatcagggttttaaaaaaaaatgataaatgttaaaaaaattatagcatttttattgctgtggttggaatcccagttgtgtacaaaaatggttgattaataatgatgccacttgttccgatgttgcattaggcgccaaatcaaccagttgtgtcatttttagatcaggataaccacaaggatttattcgcgtaaaaggagataagtccatatcaacattaagtgctagaccgtgaaaagagcaacctttgcgtatacgtaatcccaaagagcaaattttatcaccattaacatacacgcccggtgcatctgcacgagcatatgcgtctacattaaattctgcgagtgtgttgatcacagtattctctaaaacagtgactaattggcgaacgccaatatggttacgttttagatcaagcaaaacatacatcacttgttggccagggccgtggtaggtcacttgtccaccgcggtcagattggatcaccggtatagagcctgtgtttaaaaggtgttctgctttacccgcttgaccttgggtaaaaacctgttcatgttgaaccagccaaatttcatcaggtgtatgactttcccgtttttccgtaaactgatgcatagaatcagaaaccggtaaatagggtttcatacccaattggcgaataatgattgttttatcttgcaccgtgaaaatcttcatttgtagcgtaattgtgaaaggcagtataacgctccaacaaatgaactaccagaatgagatgagattattgcttcagtttgtgtttgataaaggaatattgataaaaaaacgacgtagtgagaagggggatagatgtgattaaccaagcagtgcttaattggcgattaaccccaattaggcttttatttaagtgagacttactaaatctaggtgacaaatcaataacgaaataataagaattaatataagaagtaaggtgaaagagaaagataaagagaagatactgcgtaatattgcttcttaagtacgtctaatgccccctaatagggtaagggggcaaatagaaaaaaattataacaccatgcgaacaagctctaattcacctaactctttatagagggtttctacttgttcaatatgcgttgcgttgatagtcaccgagactgagtgatagttacctttgctacttggttttactgaaggtgtataatcaccgggtgcatgacgctggatcacttcaacgacttggtcaactaattcgggtttagcatgacccatgactttgtaagtaaatgagcaagggaactctaatagttcgtttaattttgttttcatcataatgtaatccttaagacaacaggcgatgttgttttaataatctcttttacacctcatcagcacaaataaaaagcgcattcctcctataatgaggaatgcgatactgatagttagggtaaatatagaatgggtaaatgtgtttattccaatatcgatataatctttatatatggacacatttatccttttcaagccttaaccaaaccaacgtgaaaataataatttgatgtaatcaatcaagcggctgaaaatgccaccttctttcacttcattcataacaacaagtggacgttgttcaatgacttgcccatcaagttggaaattaatggtgccaaccacttggtttttactgactggcgcatgtaattcaacattatctaatacataactggcctttagatctttgagtcggccacgggggatcgtgagataaacatctttatcaacccctaattgcactttatcagtatcaccataccagataggttcagcggcaaattctttacccacttgcagcggttttaccgtttcaaagaagcgaaaaccccaagtaagtagttttttactttcagcatcacggcctttagatgagtgtccccccatcacagcagaaatcaagcgcatatttccttctgttgcagaggcaacaagattataacccgcagcttcagtatgacctgttttaataccatcaacattgaggctagtatcccaaagtaaaccattacggttagtttgacggatattattgtaggtaaactctttttctttataaatggcatattcttctggaacatcacgaattaatgcggcgccaatcaatgccatatctcgtgcactactgtattgcccaggtgcatctaaaccatgtacagtttgaaattgtgtgttttgtaaacctagacgcttaacatagtcattcatcatagtgacaaaggtatcttggcttcccgcaacataagaggccattgctacacaggcatcattacctgattgtagattgataccgcgtgttaattgtgaaacggtgactttatcaccgggttttaaaaacattaatgatgagccgcgaaatacagggttgcccgttgcccatgcttcttcaccaataggaacaatatcgttgttcgatatttttcctgcacgaatggcttgacctataacataactggtcatcattttggttaaactggctggatcacgacggacatctgcgtttttttccgcgaggactttcccagaattatagtcgataagaatataggattcggcttcgatattaggaacagcgggtatcattgtttttaatgtgtcatcagcaatagcatgatggctaatagctaataatataaaggttgcactaaatagacgtgttcttagtaatttcactgggcgtgtctgtttcattctgtttgtctgttccggaaattcagggaaaataaataaaagttgataagaaaaatatcagcaaactcaggtgattctatgcctgaatttgcttttagaaaaagagtttttacgaattattaccctttattggctaacaataaacccatcgatatttttactttgtttcaaagcactttttattgtttcggcttgcgtttttgatgagtaggggcctaattgcactttatgtagtccatcagttgtattaatgacaccttgggtatttaaagcattggttaattcagttaaccatgtttgtgcattagtttgattacttaaagcacctacttgtacatagtagccttgcgctattgcgctagatgaagatactggctgtggagctggagctggagctggagctggagctggagctggagctggagctggagctggagctggagctggagctggagctggagctggagctggagctggttgagtcacagttatgggagacggtgctgttacagagggttggggagccattgtcgatggctgagtattaaagttaggacgctcaggtaatgtagtggctcttttctctatttgtgcaccttgggtaccaataccacttatttggccattttgatcaacgacaataccttcaatttgaataggggttgttggcattaactgcaaactgttataaacagcaggtgtaacctgtatttgtttgccttcaacgtaagggccacgatcgttaattcgcacaatcattgtgcgtccattgattaagtttgttattttcgcataacttggaataggcaatgttgggtgtgccgcagcaaactcataagggttgactcgttcacctatggttgttaagcgactcattgctaagctgtcgtaaacaatcgcttgtcctcgttcactaaagttcgccggatctttgactatgcgataaattaccccatttttacgataatcttgattcgcagtcgggtgataaggctcataacgaggctctatacctaatacgggttgtgtaggtacatttggcaaccttgtggttggctgattattattcacaggtttatcagcaacacatcctgcaagtagcaatgcactgacacccatcaaaacccattgcaaacgcatagaaacctcattataaactttttgataatagttttcggtgtgtatgaattgacataacaatgccaaatcctgccattagtacaattaatgccgatcccccatagcttaccagtggtaatggcacgccgactactgggaggatcccactcaccataccaatattgacgaaaacataaacaaagaagatcagcattaatccaccaatcatgactctgccaaatgtattttgtgcttttgtcgcgagataaagacctcgagcaattaagagtatatagagcgttagtaggattaaaacaccaatcagtcctaattcttctgcgagtacggcaaaaataaagtcggtatggcgctctggtaaaaactcaagttgagactgagtcccttgtaaccaacctttgccatgtaatccaccagaaccgatagcaattttagattggataatatgatatccggctcctaaggggtcaatttcaggatcaagtaacatcatgacccgtgttcgttggtaatcatgcatcaagaaaaaccagagtatcggaataaatccagcaattaatagtgttgcgacagtaattaaacgccaactcataccggcaaggaagataacaaaaattcctgaagcagcaattaaaatagaggtacccaaatcaggttgtgcagccactaaaagggtggggacgaagatcaacactaaggctattgctgtgttacgtaatgttggcggacaaacatcacggttcataaagcgagcgaccattagaggaacggcaattttggcaatttcagaaggctgaaaacgtatgatacctaaatcaagccagcgttgtgcacctttactaatttgcccaaagacatcaacaaaaataagtaatacaacacaaaatacgtaaaggtgaggagcccagttttcatacacccgtggagggatctgcgccatgataatcataacgataaaacccgtagcaatttgtcccagcttgcgttccatcatatcgggatcttgcccacttgctgtccacataataaatgcgctatagcataataaggcaataatgcagagcataaagaatggatcgatatgtaaacgcgtccagagtgattttttcttgttattttctgtcattgggttattcctctgagccacgcggtgaaggcggggaaataggcaactcggtgttgttgtctccaagtataatgtgatcaagtatttggcgagtaatatccccaacagatgggccagcaccaccattttctaaaattatagagacggcaacggtagggttttcataaggcgcaaaagcaatcattaatttatgatcacgaagatgttctgctaattggctagcattataggtttcataactaaatacctgtgctgtacctgattttgcagcaatcttataaggagcatcagcaaagctacgtcgccctgtaccattgggtagattggcaacaccatacataccgtacttcgctaactcccaataaccggagttgatatcgccaatttggcgtgtctctttatccacgtaaggtagcatttcattacctaacttggtgccataaagtaagtgaggggttttaacctgaccatcgttaattaaggtcattaacgcttttgacatttggattggggtcgccgtccagtaaccttgacctataccaacagggatggtatccccttgataccaaggttttttatatcgttgttgtttccattctcgggttggcataatgccattacgctcttcagaaaggtcaatccccgtgtattcaccatagccaaagcgggacatccatgtggaaatacgatcaatacccatatcataggcaacttgatagaagaaggtatctgctgactcaataatggatttagtaacattgagttttccatgaccccaacgtttccagtcacgatagcgtttttcagagccgggcagttgccaccagcccggatcatggatagttgtgttaggagtaataaccccttcacttagggctgcaacagacataaagggtttaaccgttgatgcaggaggatagagcccttgggttgcccggtttattaatggtctatcaggattattaagtaggccttgatagtctgtattagatattcccccaacaaataggttagggtcataacttggattagaaaccagtgctaatatctcgccgttacgaggatctgtgacgaccacagccgctcggctagtggttaatagcgtttcaatataggtttgtaattcaagatcgatagttaggtagatatctttaccggcttgtggtggttgctcatgcaattggcggatcacacggccacggctattaacttcgacctcttcataaccggttttaccatgcaaaacagattcataatagcgttcaatacctaatttaccgatatctcgggttgctgcgtaattaggatagagcccttctttttcaagacgttctacatctttatcgttaatttttgcaacataaccaataacatgagtaagggctgaaccataagggtaatagcgacgttgatagcctttgatttctaatccgggatagcgatattgattaatggcaaaacgtgccacttgcacttggtcaagtgacgttttaagcggaatagaactaaaacgacgagagcgttttcgctctttttcaaatgcagcaatatcgtcgtcagttaaatcaacgacctctcgtaaactctccaatgtttcttggatattagccactttctccggtacgatttctaattgatagatagtacgatttagggcaagtggaaccccattacgatcgtaaataatgcctcggctcggtgggatgggaactaatttgatccggttatcattcgagcgagtttgataatcatcgtggcgagcgacttgtaagtgatacaagttaaaaactaagatgcccgttaaaactaagatccctgaaaatgcgacaataacacggcggataaagagttttgactccgctgtataatctcgaaacggggtgcgttttcttttcttcatcccattagttgatttcacttacttacccgccaatttattattcccgatgataaggatggtttgtggtaatactccatgcacggtaaaggctttctgctaccactacacgtactagcggatgtggcatagttaatggagataaagaccaactttgttctgcagctgctttacaagcgggggctaaaccttcagggccaccaattaataagctgacatttcttccatctaacttccagcgatcgagttgctcggcaagttttggggtatcccaacgggcgccaggaatatcaagggtgacgatacgatttcctttacctaccgctgctaacatctgttcgccttctttttcgagaatacgcttaatatcagcatttttccctcgtttacccgcggggatctcgatgagttctaagggcatatctttgggaaagcggttaagataatccataaagccggtctggatccagtccggcatttttgtaccaacggcgatgagctgtaatttcaaactcagctccagagtttttcgagttcgtacatacggcgactgtcttcttgcattacgtgtaccatggcttcaccaaggtcaacaacaatccaatcagaaacgccttgtccttcgatgcctaaaggttgtaatcctgcttcacgacagtcatcaaccagattatcggcgacagacattaagtgtctgtttgaagttcccgtacagatgatcatgtaatcagtgacacttgattttccacgaacatctaatgcgataatgtcttgagctttagaatcctcaagtttatcaataataaattgctgtaattctgagccttgcaaaagggtcacctttttctatttagttaactcaatcgagaaaataacaaagcgctattttaaaggaatttataccaataaatctattttactcgatgatttattccagttgtcgatagcaaaaacatctatcaagtatggttgctattcgacgcttgatttagaaaaattcatatatgcctatttattgcgccataataaataataaaagccggcagataagaactttccaattagacgacagttttactccacagttcccttaatgggagccgagggtgagaataacagtaaaacaatgtctgtcaatgctcgtgaaatacctgataacggtatcatcacgtcaatgattgtatcattatacggtgtaatgttgagatagtgactaagagaaacagacgaatgaaagaaaattattattatttggagcaaacttcagaaatagcgagtaacaaaaacgcattgttacaggcagattggcaacgattttgtcaattgttatgctatgaaggcattgaaattaaacaaaataatgatgaaaaacgacaaaataaggcagtgatttgtcgagttaaaatgaaaggggaatattcatcaaccttattcacacagattttagggggaggagagttacaattaacccttgaacaattttctcaacctagtggattggaacattttctgacacagttttttgccttaattgattatcaacagcaggtaaatgctaagttgagcaaaaaagcactgatccaatttcatagtcgatataaatatttgttaatggcttattctcaagtcgcttatcgagaattggggcgttatatggccaatatccctaattcgctaccgctgttacaatttgccgagcagtatcaaaaggccttaatgaaagcactatcaataccagcaactcgagaagggcataccaatgcattaatgcatatggcgggatattttaagcgagcacttagcgcagagcaaaaacagttgttaacacaagagattttatcttatcggcaaggaaaaacgagtctttcggctcctttgtcacggttgaaaaactacttggcgttttatcctgataattatctactttctcaacgctatttttcaccttatccagctgtatttgatgacttaagagcgcaattttaatctctaagatctgttatcgatacaactgatgctgtttgatatagttttcaacagactcaggcagaagatcatgacaatctaatcctgctttatgtctagccctaatatcggtagctgaaatattgtataaaggagtatcagcaagaaaaattttcccggcgggtaaacagtgaatatctgcttgctgtttggtttgatgttgttcaagccaggtttgcatttgtggtgatgtaaatgtggtttggtaacccgggcgagcgcaaaccaataagtgacacacatctaacaactcttcccatttatgccaagtatcaattgaaagtaatgaatcttgtccaataataaaggctaatggctgtttctcaccaatttcttgtctaaacgcttttaatgtctcaatggtataagagggagtcggtttctctaactctcgagtgtcgactttgaaagcactaaaaggttgtaatgcgagccgcaccatggctaatcgctgttgtgaagaggcttctggttgggggcgatgagggggaatattattaggcaaccaaatcacttcttttagccctatcaagccagaaagggcttctacaggacgtaaatgcccataatggatcggatcaaaagtaccaccatatagagcaatggcttgatgaattaaaggggggttattattggtgctagccatggcgaataaatccttccggtaatgcttttccacataataataagccaagggcatgaagttcaggccaaacgttttgtccgtgatcctgtttaagggttatttcaatctgggtaagtaatcgcatggcagtgagtaattgatgctctgacaaacgttgtaacgcggcggtaaatatcggacgtcggttttgccatatccgatgttgatcgaaaacggattttaaggaggccgttttagcgctacgatgtaaggtaattaattgcattaattcgcgttgcaatgttctaagcagaataacgggttcagtatcctctctttttagttgctgcaagatatgccatgcccgttgggttttgcctgctaataatgcatcaatccaatgataagcagtaaaatgagaggcatcattgacagccgcttcaactcttggcagggttaatttaccatcaggatagagcaaacagaggcgttcaattgcttgagctaaagcgagtaaatttccttcatagcagtaacacagtaattgattaccttgttcatcaagctcaaggcctttttgcttggcgcgtctcgctacccaatttggtaatttatctaactcaggggttaagcaagtcacataaataccttgctggctgagtgttttaaaccattcgctattttcctgtgccttggttaatttatgtccacgtaaaattaacaagagatcttcatgcaattcgtgagataagcgtaaaagcttttctgacattgccgcattaggaccattttcaggaagatggagtaagatagattgcttttgtgaaaaaagactcagtgactgacagagtgaatatatttcattccaatcagtgctgttatcaagggtaaattgataatgttccgtaaagccttgtgattttgccaccgtttgaatggcatcttgagattcttggagtaatagcggttcattaccccaaagtaggtaactttggcgcaacccctcttggagttgcgcattaagttgttctggataaaggcggatcatttggctggtgagattatctgtttcgctttagctgcctctgacgctttttggcgttcagcattgtgaaccaccaataatttacgtactaagatagcggtagcctgttcacgcatttcctgtttgataatatcattttcggcatctttagctaatgcttctaatgggttatcaaagaatggacgtgaaacctgtgatgaaatagggtagatggttccatcaggcataatcacttgtgcatctaggacaaaagtgagctgacgttcagccgatttaccgtcttgatacacagagacagtctctttattttctgaagatccaacaattttgagaacaggaatatctgcttttggcgtttcaaccagttgaactccacttaatctcaattgttgacgcattacacgagacagtggcccgtatgggtcaccagagcttaggtaaagcgtttttaattcagctggaacttgggttttaccttgtaggtgaaaaccgcagccagcggtgaccaacaccgctaacgcaaaaaacagcgaaaatagatatcgcactaagcctccttatcagccaacaacgatgttcagtaatttgcccggtacataaatcactttacgtacggtgacattttctaaatatttagcaacactgtactcttttgttgccatttcctgaacataatctttttctgaattagcaggaacagtgatacgaccacgtactttaccattaacttgaacaataataagtttcgtgtcatcgaccatcgcttcttcatcagcaacaggccatggtgcaacatcaatatcctctttacctcctaacgcttgccacatgacaaaacaagcatgtggaatgataggagaaagcatacgtaccaccgcttctaatgcttcttgcattaaagcacgatcttgctcagtctcttgtggtgcacgtgttaatttattcattaactccataatcgcagcaatagccgtattgaatgctaagcggcgacctacatcatcagaaactttggcgatagttttgtgtaaatcgcgacgtaagtctttctgctctgtggttaatgttgccaaatcaagtgattgagtcgttcctttttcggtatgctcatgaactaaacgccataaacgacgtaagaaacggttcgcaccttcaacacttgattcttgccactcaagtgttaattctggtggtgcagcaaacatcataaatagacgtacggtatcagcaccataacgctcaaccatggtttgtgggtcgatgccgttattttttgatttagacattttgctcataccagcgtaagtcagttcatggcctgcactgtcagttgctttgatgatgcgatttttttcatcgcgttcaacaatcgcttctgcaggagagacccaatggcgagcgccatcttcaccggtataataaaatgcatctgctaataccatgccttggcacagtaagcgtttagcaggttcatcagaattaactaaaccagcatcacgcatcaatttatggaagaaacggaaatacatcaggtgcatgatagcgtgttcaataccaccaatgtaccagtcaaccggtaaccaatagttagcagcttttggatctaacattcccttgtcgtaatcagggcaggtataacgtgcgtaataccaagaagattccataaaggtatcaaaagtatctgtttcacgtagcgcaggttgaccattaatcgttgttttagcccactcaggatccgctttaattggactggtaatgccgtccattttcacatcttctggtaaaataaccggtaattggtcatcaggaactggaacaacgctaccatcttctaaggttgccattggaattggcgcaccccaataacgttgacgagaaacaccccagtcacgtaaacggtaattcactttacgttcacccacacccattgcagtaagtttatctgcaatagcattaaaaccagcttggttatcaagtcctgagaattcaccagagttaatcaggctatttttctcagtcagagcgcctgttgataagtcaggttggttaccttctgcatcagcaataaccgctttaatcggcaaaccatatttagtggcaaattcccagtcgcgttcatcgtgacctggaacggccataaccgcacctgtaccgtattccattaagacaaagttagctacccaaatagcgactttctcttgggttaatggatgaatagcatacagacctgtagcaataccttttttctccatggttgccatttcagcttctgccatcttcatgttacggcattcatcaatgaagtgctgaatttcaggattattttgagcggctttttgagctaatggatgaccggcggccacagcaacataagtgacccccataaaggtatctggacgtgtggtatatacggtcatggtatcgtcgctatctgcgacatcaaaggtaatttctacaccttcagaccggccaatccagttacgttgcatggttttaacttgttctggccattcatctaacgtatctaagtcgtttaacagctcttcagcataatcggtgattttaataaaccactgtggaatttctttgcgctcgacaggggtgtcgcaacgccagcaacaaccatcgatgacttgttcgttagccagtacggttaagtcgtgtgggcaccagtttacagcagaggtttttttatacactaaacctttttcatacagcttagtgaaaaaccactgttcccaacgataatattctggtgtacaggtggtgacttcacgatcccaatcataaccaaagcccagtttttttaactggcctttcatataattgatattttcataagtccacggtgcaggtgcggtgttattttttacggcagcaccttctgcgggtaaaccaaacgcatcccaaccaataggttgtaagacgtttttacccaacatacgttgataacgggaaatcacgtcaccaatggtgtagttacggacgtgtcccatgtgtagtcgaccagaaggataaggtagcattgacaggcagtaatatttttctttgttattatcttctgtcactttaaatgtattgttcttttcccagtgttcctggatagtttgctctatatcttcgggacgatattgttcttgcatggcaccgataatcctatggtgaattaatggctaccgaagggtaaccgctatgatgaattaagacttgcatagcatagctgattttgtctaatagccacaactattgatctcaaggaaagccattgtttgcataacttttttgccacaatggcgagatagcgcgaaaacagcatttttttgttaatgataaatgcgagattttcaagcggttagcctaattattgcaataaaaatgaattaattgctactgtgttgcgtcatcaaaggttgatgattatttttagcgatattttgctggcatgtaataattcatgccagcaaaggggaaaagtgagtgggatgaaaaagaaaattgaagattaatgtaagattttagctaggaaatctttagccctttctgatttaggattatcaaagaagtcatttttcgggctatcttcgacaatacgaccttcatccataaaaataatacggtcagcaacttttttagcaaagcccatttcgtgtgtaaccaccatcatggtcatgccttcattagccagctcaaccataacatcaagaacttcattaatcatttcaggatcaagtgcggatgtgggttcatcaaatagcatcgcaataggatccatacataaagcacgagcaatagcaacgcgttgttgttgaccaccagaaagttgagcagggtatttattagcgtggttggctaagcctacgcgctctaataattttagccctttctcttttgctgcacctttctctctattaaggactttcacttgcgctagtgtaagattttcaataatggaaaggtgaggaaataattcaaagtgttgaaacaccataccaactttggctcgtaacttagctaaatcagttcgtttatcattgacttttatatcatttactaggatttcaccttgttgtataggctctaaaccattaacggttttgataagcgtcgatttacctgagcctgaaggtccacagacaacaacaacttccccctttttcacttcagtggaacaatctgtcagcacttgaaactgaccataccatttggatacatcttttagggaaatcatctaagtagtcctttttttaagaaagttcactaacattgaagcggagaaactaattataaagtagacaaaaccagcaaaaaggatcatttcaacctgtgtgccatcacgctcaccaatatttgccgctgttcggaaaaagtcggtcagacttaatacatacacgagtgaggtatcttgaaataaaacgataccttgtgtgagcaataaagggatcatggcacgaaatgcttgaggtaaaatcactaaacgcatcgtttgtgattttgtcattcctaaagctaaggatgctgaaaactggcctttactgatgctttgtatacctgctctgatgatttcagagtaataagcagcttcaaatagagagaacgctaccattgctgaaattaaacggatatcactttttggtgaaaggcctagaacattttgtaatatgttaggcacaattaaatagaaccacagtaataccatcactaaaggaatagaacgaaaggtattaacgtaagcggccgcaaaccaactgatgggcttaaaagtagataagcgcatcactgcaagtattgttccccataaaataccgataacaattgctgttatggtgatttttaaagtaatgaccatgccatccattaaaaaaggtaggctaggaacaacagaactccagtcaaactcgtacattattgacctcctgctgtgccaggtaaacgcacccgtttttctaaccagtgcataatcaacataataatgacgttaataaagacataggctagtgtgatagcggtaaaggattcataagctttagctgaataatctaataatttattcgcttgcgcagccatatcaatcaggccaatcgttgaggcgattgcagagtttttgactaagttcagcatttcagaggtcattggcggaataatgacgcgataagcattaggtaataaaacatagcggtaggtttgtggcagtgttaagcctagtgctaagcctgctgctttttgtcctcttggtaatgaattgattgccgcccgcacctgttcacacatgcgcgctgcggtaaacaaacctaaacagagtgctgaagagacaaagaattggatattcggcgttaagtccattttgaaccaatcaccaatagcttgtggtaagagttcagggatcactaaataccatgtgaagaattgtacaatcagggggacgttacgaaatagttcaacatagatagcccctaaactagagagcaagcgattaggtacggttcgtaaaataccaaaaaaagagccgacaataaaagcgatgatccaagcacaaagagataaagcgacagtaacttgaaagcctgaaataagccaacctaagtaagtggtatttccaaaaggggcttcttggaagaatatcccccaatcccaatcaatcgacatgatttcacctccggtgaaaaaaatggggcagggaacggctgccccaaacttcactgatctgtctgtccaacagatactttataattattaattttgcatcaattacttatatgcattgttagttcaatgctttatcatttggtgatgcaaagagtgctttcatttcatccgagatagtgaattctaaattgaggtttttcggtggaattggggcattaaaccaacgattgaacgatttttctgctgcgccagatttttgcgcattagcaatggtttcatcaattaacgacttaaattgtgtatcacctttgcgtaacatacagccataagcttcttccgattgaggtgttcccacaatctcccataacgcaggttttttcgctttagcacgttcacccgctaataaggcgtcatccatcataaaagcaacggcacgccctgattcaagtgtacggaatgagtcgccatgatcttttgcgctaataatgcgcatattcatttttttctcatcattgagcttgttgagtaacatttcagatgtggtgcctgacgtaacaaccacatttttgcccgcaagatcagcaaaatctttaattccactgtcttttttcgcaagtaaacgtgtaccaacaataaaaatagtattcgagaaatcagcttgttgttggcgagcgagattattggtcgttgagccacactcaaagtcaaatgtaccattttgtaatagtggaattcgattctgagaagtgatagggataagacgaacttgtaggttaggtttgcctaatttttcttttactgcctcaacaatcaggttggaatagtcttgagagtatccgaccactttttgttgattatcgtagtatgaaaaagggacagaggattcacgatgaccaacaataataatatcgttatcgttgattttttttaaggtaccagtgagttcttctgcttgcacagctcctgcagcccctaaaatcattaatgataatgctagtttacgcatgcgcataataactcctgtcgtggtgatattgatgtgttgctttgtgttacttttttgttttaatttgttttgataatgttaataaatagaacaaataacatacggttgggaagtgcaatattccaaatacgagagctatctctcaataaaaggatgaaataaaaaattgttcaatgttttttggaagtgattttcaatatttaaaattattatagtaataaccatgagaagttaaaggttaaaaagaacaaagaagaaaaaggcgttaatctaaaaaagaaaagaatttgtaaagtttatcttaaggagttgtttgtctgtagattaccgttaagatagcaggtcaacaaatgaggaaatctatgcataattggcggtcaggtcgctggctagtgttgataacagtattgctgatcttgtgttgtattgttcagcgctctatgggggctcatgtgattagtgagcgcttagcatctgctgtttcgcaaacacagtcctcattctcgacgccaattgcagagcaacaaaatgcaagtgaagggaaatattcactttcaacctgcgaattaagtgctaaatcactcttatcgattcctcctttagcgattgaaccgcttttttatacttgggcggtattacttttatttggtatggctgccatttatgtttctcgtcaacgtagccagaaaaaacaacatcacccacctccacgaataaggcttcaccttcattactgtattctaagggattagtagcgctttaactcaataatacgtcttatattgaggcgttgttttatgtgtagcgttagaggattttttagggagttgctatggttcgttcttttttaatagcattgatgttgatgctattttcattatcttcattagccgccgatacaggttggctaactatgccagacaatgatcatgctcaggttagggctacggctgacaagtcatcgacaggcgatgttaaaatattgcttgaggtgcaattagcgccgggctggaaaacatattggcgctctcccggagaaggtggcgtagcacctgaaattaattggacgcaatctgtgtctgatatgatatggcattggccatcaccttccgcttttgatgtcgcaggtattcatacccaaggttacgataaagaagtcgtcttccccattgaactaaaatctgtcgatagcgataacttaaatggggtattaacactttcaacctgtagtaatgtctgtattttaactgattactcattaaatctggatttaaacgagcctgctcccgctgactttgaatggcaatataatcaagccatggccaaagtacctgtgacaagtggattaatttctgctgtttcatctgattatcgaaatagtcaattaaccctctcattacaacgagaacaaggtgactggcatcaacctaatatttatctcgatccaccacaaggaatgctatatggcattccacagttaacagcaaaaggtgatcatttatctgttactgtcgatgtaaccgatgattggggagacgctgcgggtgacattacaggaaaagcactctcctttgttgtgactgacgatggctattcacgtcaagtcaatgacactataggccaaggcgatagcgcatctctgcctactgctgactcgggggtaggattatggagtattttagcctttgcgctgttagggggcttaattcttaatttaatgccttgtgtgttgcctgttttggcaatgaaattgggctcaattcttcatatcgaaaaacgtgatacaggggctattcgtaaacagttttctgtttctgttgtgggaattttagtgtcattttgggccttagcgctgtttatgaccgtattacgctacagtcaagaagcaataggttggggcatacagtttcaaagcccttggtttatcggctttatggtgctgatcacggctatttttaccgctaatttatttggcctatttgaattacgtttatcaagtaatatgaataccaaaatagcgacagcaggaggccaaggttatagtcgacatttctgggaaggggcttttgctacattgcttgctacaccgtgttcagcccctttcttggggactgcggttgcttatgcattgatagcaccattaagtgagttatggttaattttcaccgcattaggtcttggaatgagtttaccatggatcatggttgctatgtttccatcaattgccaaagtgttgccaaaacccggtaaatggatgaatcgcctaagagttgttttaggctttatgatgttgctatcttgtatttggctgatcactttattgatcccccattttggtattggcattgttgcggctatttttgtggctatcgccctgatcttgctttttgctattgctaaacattacggcaaaaaaacgctatttgcttcaatggtgatcacccttattttgggtggtacaagctatctatttattgctcagcctgatactcagaccttggcggggcaagatcatgtaaattggcaaccactctcagaagaggctattcatcaagcgttagctgaaaataaacgggtgtttattgatgttaccgcagattggtgtgttacctgcaaagcaaataaatacaatgtattattacgcgatgatgtgcaaaaggcactttcagagcctgatgttgtcgcattaagaggggattggacgaaaccgtcagaacagatcacccaatttttaaaacagcgcggtcaagtcgccgtgccgtttaaccagatttatggaccatgtaacaaggagggggagatcctaccgcctcttttaaataaagatctaatgttaactattctttcagaggctaaaggagcccaataatgaaaaaaacactttctgtactggttatctcttcgttactttttggtgcaaatgttcaagccgctgccttgaatgcagctcaagaaaaagaagtacgtgcattagttcgtgatactttagtgagtaatcctgagattttggaagaagctatcatggcattgcaaactaagaaggcagatgagcaacaagcacagttccgtcaagcattggcctctgaacatgatgcattatacaacgatgcggcaagtccacgtattggcgctaaagatgctaagttagtgttagtgtcgttcactgattataactgcccgtattgcaaacgctttgacccattattagaaaagatcaccgaacaataccctgatgtggcggttatcattaaaccattaccatttaaaggtgaaagctctgctaaagcctctcaggcggtgctttctgtctggaaagaagatccaaaagcattcttagcacttcatcaacgtttgatgcagaagaaaacgatgctagataatgcaagtattgaagatgcaatgaagagcactaatactagcaaaattaagttaactgatgacagcttaaaaacgttgcaaaataacttagagctttctcgtaaactgggtattcaaggtacgccagcgacggtaattggtgatactattttaccgggtgctgttgattatgatcagttagaaattattgtgaaagaacaactggcgaaagtgaaaaaataatggcaaatcgtttacgaaaatggggtaaagaattaattattctcgcccttatttttgtggctatttcatttgctatggactggtggcgtcaaccaacgccaccagaacttactgatttatctacgctttatacagttgatgataaaccagtctcattgattgcccttagccaagagaaaccattactgatctatttttgggcgagttggtgtggcatttgtaagttaactacaccgacggtaaatgatttagcacaacagggttataatgttacgtctgtagttatccgctctggtgatgatgccaaaataatacgtggcattaactccaagcaactagtttttccggttattaatgatgatagaggggctatttctcaacgttgggggataagtgctacaccttcttttgttattctctataaaggtgaaatggtgcactttacaagtggctggacatcctcttggggattaaaacttaggttatggtgggcttcaatttaacttgtttatcagagtttaaatgaagaaaaaataatgccaggtaggctgataataaaatctattatctcatagacaagttttttacgtctgcgttttatttttgcttcttggctaccttgaacaattaattccttttcattgtaagtgcgttttgaggtattaatatgtattggtacaatattaataggaataacgatttgattattcttattggccggtgttaattgagctaatgtccaaccatattgatgttgtttatctccaaacgcatttttctggataatacgaccgtaataatctttacgaaaacctttttcttcattatcgctggaaatctgatgggcatgttgccaataaggtaaaacatctgttggtgattgaatgagtcgcgatagtgctggtgggtcaagtgggatcatattgagacgtttagagcttgcttcttgtttttgctcataggctctcgctgtttgccaatgtaaaggcacaattgtttcatcttcaataagttgatgaatcgaactaggttgttttgataatacccagccaaattcattttgttgattaaacagttggcgcttgatccatttagtttctttatctttacgaaatccttttgtttcattatcggcagatatttttttcgctctttgccaaataatatcaagaatatattcagggtaatggatcattgaaaagtccttttattagaaaagcccttacttaattaattgttttaagattaattgagcagggctttatttaacattaagaacgacgcttaataaaagcaagaattaaaaatacccctgctaaaatccacactggataactccccattttataataaggtgttgatcctgtcgtgggtgtcattttttcagctaatgcaccggcttcaaattgtggaagctgggcaataacatcaccattagcagcaataaaggcggtaatgccgttattagttgaacgtaataatgggcgtcctaactctaatgaacgcattctagccatttgaaaatgttgccatggaccaattgaattaccaaaccaagcatcatttgaaatagttaataagaaacgtgtatccggcttaaagttagcgcgaacttgttctccaagaataatttcataacagatggcggcggttattttagcatcatttaccgtcagttgaggttgtatgtattcaccttggcttaatgatgacataggtaaattaaaaaatggcgctaatgggcgcaataaggactctaaagggacatactcaccaaaaggcacaagatgatgtttgttatagcgatctgttgccggatattggtaagcatagtgttcacctaatgtaataacactattataaaaacgatagccttctaaggtgggacgcgcatcaataattcctgtcattagatgcgtgtcttgtgctcttaattgtttatccaattgcgctaaaaagccttgttgctgaatttcaacatcagggatagctgactcaggccaaataattaagtttgctttaccgataaaagggcgacttaaggtgagataggtgtttaacgtactttctaaagtaccgggttgccattttaatgattgcgcgatattgccttgaactaaggcaatttcttgtgtttcatcagttaaaggttgataccattgataagatttaaagctgataggtaagagtaataatattgctccgatcaccgcactatatagtgatttacgatagatagcgacagcaataagtccactaattatggtcagcaaaaaggttatcatggtgacaccaaaaataggtgcaataccttttaatgggccatcaatttggctataaccaaattgtaaccacggaaaccctgataacacccaacctcttaaaaattcagtgagttgccatacagcgggagccgcaaagacaaaacgccaaacggtaggtttagggaagaacttgtttaataatccggcaaatagggcggtataaagcgataagtaaagggctaacaatatgactaagaaaatattgatagcaaatggcattcccccaaaatcagcaatgctgacatatacccagtttacaccactaccaaataatccaaatccccaggcaaaaccaagccatgccccttgtcgtgtggttcgttgcgttattatcagtagcaaacctgataaagaaattaacgctgcaggccagaaatcaaagggagaaaatgcgagtgtgccactggcaccgaaaaaaaccgccagtagggtgcgaacccactggcggtttaataaagagaaattattcattaatatcctacacatcattacctagttcaggtacaggcgcatcgtcaggaatgtgcacataaacctgaataattttacggctatctgccataacaactttaaattggtaattatcaatggtaatagtttcacctctagcaggaagatgaccgaaggcttgcataactaaaccaccaatcgtatcgacttcttcatcactaaagtgagtaccaaatgcctcattaaaatcttctatttgggttaatgctctcactgagtaggtatggcgacttaatggacgaatatcaatatcatcctcatcatcatactcatcttcaatttcgccgacgataagttcaagaatatcttcaatcgtgaccaaaccagaaacaccaccaaattcatcaatgacaatagccatatgatagcgttgcgaacggaactcttttagtaagcggtcaacgcgtttactttctggtacaacgacagcagaacgtaaaactttgtctatactaaatggctcagcaccagtacgcataaatggcaataaatcttttgccattaataagccttcaatatgatctttgtcttcactgatgacaggaaagcgagagtgcgctgaatcaataatcacatcaaggcactcatcaagggtttgattgcgttttaatgtgacgatttgcgagcgggggatcataatatcccgtacacgctgttcagcgatatccattaccccctctaacatatcacgggtatcaggatcgattaattctttctgttcagaatcgcggataagctccatcagatcatcacgatttttaggttcaccgtggaataactgattaagcaatgtgagaaacccctttttaggaccagggttatcgttactcgaagattggtcgtcgctcatggcgttttaactatttttcctcattgaatggttattagatatagtatttatcataaaataaagagaactgttactctttttcaatcaaatagggatcttcataacctaatttttgtaagatttctgtctctaaaccttccatttcttcagcttcatcatcttcaatatgatcatagcctaaaaggtgcagacaaccatggataaccatgtgtgcccagtgctcttcaacagttttattttgctcatcggcttctttttcaacgacctgacgacagataattaaatcacccagtaaaggtaattccacttcaggcggtgcttcaaaaggaaaagaaagtacattagttggcctatcttttccacgataagttaggtttaactcatggctttccgcttcatcaacgatacggatagtcacttcactaataggctgaaattgcggtagtacggcttccagccaagtgataaattgggcttcactcggaagcccttgtgtattttcagtggcaacttgtaaatcaagaatcacttcactcatgattttctctctgcagtctctctttttctgctttaattgcttggcggcgtttttgatcttcaacttcccaagcttcatatgcgacaacaatcttagcaaccacaggatggcgaaccacgtcttcactatggaagaagttaaagcttaaatcatcgacattagatagcacttctatggcatgacgcaatccggatttatggcctcgaggaaggtcgatttgcgtgatatcacctgtgatgaccgctttagagttaaaaccgatacgcgttaaaaacatcttcatctgttcgattgtggtgttttgactttcatcgagaataataaatgcgtcattgagtgtacgacctcgcatataagctaaaggggccacttcaatcacattacgctctatcagtttctcaactttttcaaaacctaacatctcgaataacgcatcataaagtggtcgtaaatacggatcgactttttggcttaaatcgccgggtaaaaaaccgagcttttcacccgcctctaccgcagggcgagtcagtaaaatacggcgtacttcttgacgctcaagggcatcgacagcggcagcaacagccagataggttttccctgtacctgcaggcccgataccaaaagtaatatcgtgagtttggatattggcaatatattgcgcttggttaggcgtacgtggttttatcacgccgcgtttagtgcgaatattggtcgatttcccaaattcaggcacatgctcatcactttgctcaagcactcggctctctttgatggcaaggtgaatttgctcagggtcgatgtcgggtatcacacctttaatgggtgaggtttccacatacagatgtcgcaaaattcctgcagctgcattcacattcagtgatttacccgttagtttaaaacggttatcacggtgattgatctcgatacctaaacggcgttcaagttgcttaatattgtcgtcaaatgggccacataaactcattaaacggtcattatctgcgggctctaagaaaatctcttgggtcgctacctgtgtatgggctattactgtcactgagtatccttttgttaagtctgatcaattaaggttggtaaacacctacacctaattcatcttctttacgagtacgggcaataacggattctggtgattcatggatacgtaaatccatttgatcttccgttctgaccactttaccacgcaatgagttagcgtaaacgtcaacaatttcgacatcaacgaatttaccaatcatatccggtgtaccttcgaagttaaccacgcggttattttcggtacgacctgaaagttccatcacatttttacgtgaagggccttctacaagaatacgttgtacgctgttaagcatggcacggctgtagttcattgcttgctgattaatgcgctgttgtaacagatataaacgctgtttcttctcttcttcactcacatcatcaggtaaatcagccgcaggggttcctggacgggctgaatagataaagctaaagctcatatcaaagtttacatccgcaattaatttcatggttttttcgaaatcatcttgcgtttcacctgggaaaccaatgataaagtctgagcttatcagaatatcagggcgtgctttgcgtaatttacgaataatgctcttatattcaagagctgtatgattacgcttcattaaggttaaaatacgatctgatccgctttgtactggtaagtgtaagaagctaaccaattcaggggtatcttcataaaccgcaataatatcgtcagtaaactcaatagggtggctggtagtaaaacgaatacgatcaataccatcaatcgctgccactaggcgcagtaattctgcaaagctacagatttgcccgtcaaaggtttcaccacgataagcattgacgttttgacctaatagattaacttcgcgtaccccttgagcggccagttgtgcgatttcaaatagaatatcatcacaagggcggctgacttcttcaccacgcgtataaggcactacacaaaatgagcagtatttattacagccttccatgatagaaacaaatgcagaagggccttcagcacgaggttcaggtagacggtcaaatttttcaatttcagggaaactgatatcgaccactgggcttttggtgccttttacctgattaatcatttctggtaagcggtgtaaggtttgtggtccgaagataatatcgacacactgcgcacgttgacgaatgtattcaccttcttgagaggcaacacaaccaccaacgccgatgataatatcaggtttattatctttaaaatttttccaacgtcctaactgatgaaagactttttcttgtgctttctcacggatagaacaggtatttagcagtagaatgtccgcatcttcggcgacatcggttaactgataaccgtgggtgctttcgagtaggtctgccattttagatgaatcgtactcattcatctggcagccccaagttttaatgtacagtttttttatcgtcgacattgtataaatccggtatttacagtgagataatagctaatcactgaaaaacgttgcgtgtaataagccaataaggcggttattgtagtcatttgtgtggtcagtgactagagtcagtcggcgctaattctttctggcgttcagttttgcttatttctaataaactgatatagcgcttacctattatttttaaagcaatgagttatggcataacaatgatgagaaatgtaaaaaacgattttgatgcagtcattgccggtggtggcatgattggcgcagccgttgccattgggctggcgcaagaagggttgcgtgttgcaatggtagaacggcaatctccagcaccttttgatgcctcatctcatcctgatattcgtatttctgcgatcagctgcgcgtccgttagtttattaaaacagctaggtgcatggcaacatgttttagcgatgcgcagtgcgccatacctaaccctcgaaacatgggaagaagataatgcccatgttatttttgatgccaaaagtcttggtttacctgaattaggttatatggttgaaaatcgcattttgcaattggcattgtggcaagaagcagaacgttatagcaatatcactttattatgcccaaatagtctaagtaacatgaaatacttagataataaatggcaagtcacgcttgctgatggtcagaaaatcaccactcagttagttgtaggggccgatggggctaattcgcaagtgcgtcaaatggcggggattggcagtaatggttggcagtatcgtcaatcctgtatgttaatcaccgtgaaaacgcaattaccaccagaaaagggtacatggcaacgcttttacccttcagggccacgggcttatttgcctctgtttgataattgggcttgcttagtttggtatgattctccgcagagaattagaaagctacaaacgatgtcaatggcacagttagaaaaagaaatcgaacatgctttccctgaacgcttaggcaaagtgacacctattgcagcaggctctttcctattaactcgtcagcatgctagtcgttatgttgataatggtgtgattttagtgggggatgcggcacatactattaatccattagcaggacagggggttaacctcggttatcgtgatgtggattgcttgcttaatttagtggcgcaagcgaaacagcattttgaaccttggcattcaatggcattgttaaaaaaatatcagcgccgtcgtatgcctgataatatgctgatgcaggcaggaatggatctcttttaccacgcttttagccatcaattaccaggcttaaaattagccagaaatatcggattattagctgcgcagcatgcaggaaaagcgaaagaagccgcgctacgttatgctttagggattaaatgatgagcaatgcgatgatctgaattgtcttcatcgatcatcgcattaggtttaagcctttaagtgcttagcatgaaaggctatatgttcaccgataaaactcgcgacaaaatagtaactgtggtcgtagccttgatgtaaatttaaacagcacgcaaactgttttttatcacacacttgtgctaaacgttctggctgtagttgctgttggtaaaaaggatcatcaagaccgacatccactcgtatgggcactgtctgttgtgttttattcagtaattcaatcgtgtcatattgttgccattgtgccatatcgtcgcctaaataagcgctaaaggctttttgtccccaagggacttgggttggtgcaacaatgggtgaaaacgctgaaatactgcaatagcgagacaaattacgcaaaccaatcatcaatgcgccatgtccccccattgaatgtccactaatagcacgttgctcattggcaggaaaatgtgtctcaatcaatttagggagttcattaacaatgtagtcatacattttataatgactattccaaggtgcttgtgtggcattcagataaaaactagcaccttgtcctaaatcataagcactatcatcagccacattttcaccacgagggctagtatcaggtaccactaaaataacaccgtgttgcgcagcatattgctgtgctccagctttagtaatgaagttttgttcattacaggttaatcctgataaccaatataaaaccggatatttttgcccatcttccataggcgggagatagatagcaaatttcatctcacaattgagggtggtagaggtgtgttgataaacctcttgccaaccgccaaaacaggcatggcgttcaatgttgttcattttgactccttaacaacaaagtcagacctatttgataataggcctgagagtgattaatcgaaatgaataacagttctaattgatttaccttcatgcattaaatcaaaggcttcatttattttttcaagaggtaaagtgtgggtcacaaaaggtttgagttcgattttcccattcattgcatcttcaaccatattgggtagttggctacgaccttttactccgccaaatgcagtccctttccatgaacgacctgtgacgagttggaaagggcgtgttgagatctcttgtcctgcccccgcaacaccaataatgatagattgcccccaaccacggtgagcactctctagagcggctctcatcacattgacgttaccaatacactcaaaagtatgatcaacgccccactgagtcatttcaaccagtacttcttgaataggtttgtcataatcattgggatttaaacagtctgtggcaccaaattggcgtgctaatgcaaatttttcaggattagtatcaatcgcaaaaatacggcctgctttggcttgtctagcgccttgcagtacagcaagaccaatgccacctaaaccaaatacagccaccgagtcaccttgttgtacttttgccgtattatgtacagcaccaatacctgttgtcacgccacaaccaagtaagcagacttcttcatggttggcttgtggattgattttagcgagtgatacttcagctactaccgtatactcactaaaggtagagcaacccatatagtgataaataggttgtccattataggaaaagcgcgttgtgccatcaggcattaagcctttaccttgggttgctcttactgctacacagagattcgttttgcctgatttacaaaataggcattcgccacattctgctgtatagagagggatcacgtgatcacccggtttgacactggtgacgccttcacctacttcaaccaccacccccgcgccttcatgacctaaaatggctgggaaaacaccctcaggatcatcacctgaaagggtaaaggcatcagtatggcatacgccagtgtgactaattttaatcaatacctcacctgcttgaggtggcatcacatcaacttcaacaatttttaaaggctctcctggtccaaaggcgaccgcagcacgagatttcataatgatatccttgttgttattagcgcaggtaagtgcgtattagtgagattgcatcatcaacggagtttttttgatcttcaggagaagcgacggcatccattagaccttcacgtaaatgactttcgagtacgcccgccatcaggccattgatagcaccccgaatggcagcaatttgctgtaaaacttggccgcattcattttcgttttcaagggcggtttctaatgccaaaatttgccctttgatttttcttacacgggttaacgcggcttttttttctgctggtgagtgtggcatacataatccttaattatactatgggggagtatagtattagcgtgaatgtatgtacagcttgatcaaaaaatagcgttacgatgagtctatgtagattatcgagcaaacaatgataactatgagagtaattaatgagaaaatagacaaggcgtcagcgtgttgataaagggtgagagagaggggatatttaaggctaaaaacaaaaaagacccgccatagcgagtcttgtttgttgattttaattagtgtttgacactatcaatcaatggtgcgggaggcgagacttgaactcgcacaccttgcggcgccagaacctaaatctggtgcgtctaccaatttcgccactcccgcaacaacctttgagaaaaaaagactcgtttaacgagtctctctttcagaatatggctggggtacctggattcgaaccagggcatgccaggatcaaaacctggtgccttaccgcttggcgataccccaaaatggtggctatgacgggattcgaacctgtgaccccaacattatgagtgttgtgctctaaccagctgagctacatagccaataggagataatttctcactatttattgaatttagcagaaatatggctggggtaccaggattcgaacctgggaatgccaggatcaaaacctggtgccttaccgcttggcgataccccatccgctaattcaattgtcaacacgcatattatctatcaggaaaatggctggggtacctggattcgaaccagggtatgccaggatcaaaacctggtgccttaccgcttggcgataccccacctgataaattgacgacggttaaaatggtgcgggaggcgagacttgaactcgcacaccttgcggcgccagaacctaaatctggtgcgtctaccaatttcgccactcccgcaaaaaagatggtggctatgacgggattcgaacctgtgaccccaacattatgagtgttgtgctctaaccagctgagctacatagccatcttttttttgcataaccttcgtcggcgttgcggggcgcattatgcgtattacagacaaatccgtcaactgctttttgcattaattttcgagaaaagtgttcgtttgctcgctggttaatcattttgtcgaaaaaagatccaaaaaacaaccttattgatgaaaaatcttactaagtaaataacaacagattgtctgaataaaaagaaaaaacagcctaataggtgataatttgatagcacagggaaggggatattgcggtgtggtggtgacataataaaacaacgcacagttattttagctgcacgttgttttttaaacaaagatgactggttgaaatttatcctaaaattaatcttaattgagataaataacagccttcatttaaaaatccgttttattgtaacaaaaagattatttgtcgaataaatattgtagtaactctccattaagcattgctcgcttggtaagtgcaaatgccccaatggctgagcgatgatcaagttcggagataacaacaggaagcgcttctctaaactcttttaatacttgggtattaatgcaactttggatcgacggtagtaatatttcagccgcttcggtcacttctcctgccagaaccactttttgtgggttaaataggttaattgcaatggcgatggctttacctagatgaagacccacttgtttaatggtttcaacagcgaggggatcgttttttaccgcggcatcgcatatatcttgaatttggcattgtgttgcagataaatgctggctgggatagccttgttcaagttggtagcggactttagcttctattgcgctattggacgcaatagtctctaaacaaccaaagttaccacagtggcaacgctctcctaatggatctatttggatatgaccaatttcaccaagattaccacgctggttgagcaaaattttgttgttgataataacaccagcccctgcgccacgatgaatacgaaccaagatagaatcttcacaatctctggtggcaccaaaatagttttctgctaaggcgagactccgaatatcatggcccgcatagcaaggcaggtcaaagtgtttttctaagctatcaacgagtgcccagttatttaccttcatatgaggcatatagtggacaatgcctttattaggatcaactaacccgggcaagataattgaaattgaaataagctcattaatacgacgttgattttgtttaataaaatcatcaatagcattaataagcaaggtttcaacttcttgttgggtgctttgttctaaagggtagtgttgctctactaaggctttaccactgagatcataaagagcaacagtggcatcattgcgtcctaatcggacgctgacggtattaaaacggcgatgttccacaacaatggatattgcgcgacgacctccggttgaagcctgttgatcaacttctttaatcaagccacgttcaagaagctgacgagtaattttagtgacactggcaggggcgagttggctctgctcggcgatttgaatacgagaaatcggcccgtgttgatcaatgagccgatatacaatcgcactgttaagttgcttaacaagatcgatattgccaatttgcgtttcagtgttgttgtgactcatcagcatttacatccattagttatctgttatttcaataccattgacaaatgttgtgcaaaggttgaagtccttatcaaaagaagcaatatttgctattttacctgcttcaattgtaccgagttcgttatctgcaccaatcgcacgggcagggtaaagtgttgccatacgcaacgtttcatctaatggaataccaacatgaagtacactatttttaatagcgtcaatcatcgtgagtgatgaaccacttaatgtaccgtccgcatccacacacagcccattgcgataatatatcgtttttccagcaaaaacgaagctatccatctcatttttatttggatcaagccccgcaggagctgtcgcatctgtcactaataacagtttttcaccttttaagcgcttactgttacggatatttgcccatgaaacatgtaaaccatcggcaatgatccctgcgtaaacctcaggggtatcataaattgcccctacaagacccgggccacgacctgaaatataaggcattgcattataaaggtgagtcgacaatgaaataccgttacgaaagcctttacgcgcttcttcataggtggcatttgagtggcctgcagaaacaacaatacctgctgtgattaattgacgaacatatttttcatcgaccatttctggtgcgagtgtaattttagcgatgacatcagcgttatcacacaaatagtcaatcatctgtgcacttggttgacgaataaattgaggatcatgtgtcccttttttaatgatattgatataagggccttctaaatgtaatcccaacactttattttggtgtttttgcatataagcgcgagttgcttcaatgcctattttcatcaattcatcagaacaggtaattaatgttggtaaatagctagtacagcctaagcgttcattggctttttgcataatctctagcgtttttactgtgacattttccgcggtgtcattaaattgtacaccgccacagccattgacttgtaaatcaataaaaccgggggagacaatcgcaccttgcatatcacgagtggctatatcttttggtagttgatcctgtgggcaaacctgctcaatacgtgacccgttaataataatggcgtgatcttctaaacggtcataacctgtataaataacagcatttgttaaggcaaacatacctttgtctcctaatataagggaagtcaatctaaaaaaccgatatcagccagcaaattctggctgataagtaagagagcttagttttccactacttatcgtaggtacttaatttactaaacttaatcttggtattgctggcgctcttgcgcttcaatttgttgaaaataacgcagtgttttcacacgcagttccattgtcgccggatcatcacagactaaaattgctttagggtgtaattgtacgcaagagatagtccatagatggttaacagcaccttctgttgccacctgtactgcttgagccttattgatgccagtcgctaaaatcattaactcttctgcatctaataatgtccctacaccgacagttagcgcatatttaggcactttattgatatcgttgtcgaagaatcgtgaattagcgagacgagtatcttcagtcagtgttttcatccgtgtacgagaagcgagtgatgaggcgggttcattaaaagcgatatgaccatcattaccaacacctcccataaacagattgattttgccataagactttattttcgcctcataacgtgcacattctgcttgtggatctgttgcattaccgtttaataaattgatattttcatctttaatatcaatatgattaaaaaagttctcatacataaaagtacgataactttgtgggtgatctgctggaatgccaacatattcgtccatattgaaggtgacaacatgctggaaacttactttacctgcacgatgtagttcaattagcgctttgtacgttgctaatggcgtaccaccagtaggtaaaccaagaacaaaaggacgatcggcgcttggcgcaaatgcgttgattttctcaacgatataattagccgaccattttcccacttgctgtgccgtggatagggggattaacctcataataacctcatagaaaaaagacaaatctgacaatcaagttacatactatttcaatgcgtgattatcagtgactcatctataacacgaattgcttttcatttttagtcaatgaagacatcaatccttcaaaagatatttttaatcataaaataagctttctgacttagccagcatttaagctaaaaaatatcctatataggtgactttaatcacaaattagcactaattaatttgcgatacaaaataatttttttagactaaaaatggaattaaataattaactcatcaataaatataaatgagtataaataagatcccaaataggggttatccaagggggagtgtgtgaatattttaagttatctgcaaaagataggacgggcattgatggtgcccgttgcgacattgcctgctgctgcaattctgatgggaataggctactggattgatccggtaggctggggaaacgataatgcgctagctgctttactgatcaaatcaggtgctgccattatcgataatatgtcagtattgtttgcgataggtgttgcttatggtatgtcaaaagacaaagacggggcggcggccttaactggctttgtcggctttttagtggtgactacactttgttcacctgctgcggtatcgatgatcaaaggtctaccacttgcagaagtgcctgtggcttttggtaaaataaacaaccagtttgtcggtattctggttggggtactttcagctgagctgtataaccgctttagcagtgtcgaattacctcgtgcattatcattttttagtggtcgtcgcttagtgccgatcctcacgtcattcttgatgattatcgtcgcctttattctaatgtatatctggccggtaatttacggcggcttagtgagctttggtgaaagcattaaagatatgggggctttgggcgccggtatttatgctttctttaaccgcctattaattcctgttggtttacaccatgcgctgaactctgtgttctggtttgatgtggcgggtattaatgatattcctaacttccttgctggtcagcaagcgattgatgcgggcttggcaacggtcggtgtgacaggacgttatcaagcaggtttcttcccagttatgatgtttggtttaccaggggcagcactggctatttatcattgtgcgcgcaaagagcataaagcaaaagttgccggtatcatgatggctggggcatttgcggcattctttacggggatcactgaaccgcttgaattctcctttatgtttgttgctccagtgctttatgttattcacgcattcttaatggcgatttctgtttatattgccgcaagtatggagtggatttcaggctttggctttagtgcgggccttgtggatatgttcttatcttcacgcaaccctctggcggttaaatggtatatgttgattgtgcaaggtatcgcattcttcttcatttactatggtattttccgtttcactattactaaatttaacctgaaaacaccgggtcgtgaagatgaagtggcgggggatgaaaccgcagacggctatgatgaagatatcaaagccgtccccactaatagcaaagaagcagtgcaacaagaagcacgtcaatatatcgctgcagttggtggctcagataacttaactggtattgatgcttgtattactcgtttacgtttaaatgtaaaagatgccagtgtagtcaacgatgcttacgcaaaacacctaggtgcttcaggggttattcgcttaaataaacagagtgttcaagtgattgtgggcacacgggctgaaattgttgcaagtgccatgcgtgatgtattagcacaaggcccagttgccgcttatgctggtagacatacagataacgcggtatcgacagaaaaaacatcagaaaaacagactaataatgatgccaaagtcattcttgaaatggtcgcgccatttgatggtgaagtggttgcattaaaagatgtgcctgatgaagctttctcaagcggtgtcgtgggagatggtcttgctattaaacccacatcaaatattgtgatggcacctgctgccggtacggtagtaaaaatctttgatactaaccacgcattttgcattgaaacggataacggtgttgagattatcgtccatatggggattgatacggtcgcattaggaggaaaaggctttaaacgtctggttgaagaaggtacagaggttaaactcggccagcctatcttagagctagatcttgagtatttaaacactaatgctaaatcaatgataagtccggttatcatcagtaatatcgatgactttgataaagtgagtgatattgcatccggccaagtgacggcaaataacaccataatctataaagtattaaaataaatatcatatagatatttaatcctctataaagagatggttaaataagacgataaaacggggagtgttgtctacttcccgtttttttatccctatcttgataaatatctctgcgctctctttcgctagggtatttatgaaacctgcttattggattatagtggtgttcgtttttttgtattataaatcaatgtcatacatatcgatactcacaatcactcactattaactcacaattcaacgtagccattacctctatcatcaaggtatttatctgtcattctcatagatttgtggccaagtattttctttgcaaactcagcacttttttcttcttcatataatcttgcagataaacttctaatttcatgaaatgttggtttattctctaaatactcaggtagggcttcgataaacttacctcttaatgtttttgctgtggtattgccacagattttatctgagctcctattcatgagatttaaaacatctttaatagaataaccaatagactcaagtcttaatgagagtggtattgctactttagaacctgtttttatttgggtgacatacagcctatcattttttatatcatcccacttcatattgataatatcgctaatgcgctgagctgtaaggaccgctagtagaaacatatgcctatatttgtcatttgtgtgctccaaggcgtatttaaactcttctagcgataaccttgagcgctgaacgcttgtttttggcggctttgtcacggaaacgggattttcctttatcacaccatccgcaatggcttcattaaaagcatctagcatagtggaccttagtaattttgccattgcctttttagggtactctgaaataaatgtggctacatctcttggtgttacattctcaattggacagtcattaaagtgtaatttgattaactttattcttgattcgtaatcgtagagcgtcttctcttttaacccccggctgtttaccttccccctataagtatcaagccactcatgcaatgttacacagtgaacattattaattctgtcaactaatgactctttaggtttataaatagccaaattggcttgtatggcttcggttattgctaatgatttgtttgagccaacagaaaattcctttttagttcttacatccctgtaatagtaaatccctttacgcaaatacaagttaggcggtaaacccttgttctttgcacttctgcttctgcccattaattttctccattaaatattgcggttcccttaccattttgtcatttgttagaattgtccacggctctaactcatattctctaccaaccttttctggagcagggtataacctaccttcctttatatagcgagataattgccgttgacttctagggttagcgaaatatttattattccattctgataatgtaattcgtttcattgattattctccgtatccttcatcattaaaaaaacttccatagcgccacggtatgggtttttatttactgacatgaagtcataatcaaggcagtcagctgtccatttattagaatggtacattggtgataaccctattttattttcaataataatcggcattgcgtctgatgggttattgcatgggtcgaaaaagcgataaccaaacgagccatcaacaaggaattggataatatccattgtttgtttaattacatcgtattgcgtttcaggtaaaacagattgagctactaataaattaatctcgaaatcagatagttcggtgtatttattcattatcatctcctagtatttcattaatagtatttctgatgtcaattaagtcttgttttgtcacatccatattccaagatggagtatttaaaataaaacaatcttttgttgtaggttcaatctcaatacaatctttgtaattttccaagccagcataatatttatctttcattccatacctctccacaaacaactttaacattcctcactgacattaaatattcagcacgtttattgcattccgattgcgtataaatatcttccgtaacaggcacagcagaaccctgtattaacatgtgtaatacatatccgattatttgcatgaattgttactctgaattttaggtataaaaaaccctgcactagcagggtgggtaattaataataaagttcatttagtctagatgttatttccctttctgtttcttttaggaaatctatcaattcatttttatctttacagctaaaatgttcatcagggatgtctagtgaatgcgcatgtgaatacataacatagctatatgttttattaatgaaattctcacttaatgagtcaatgtctaagataaatataaataaatataaactcgcatgtatattatttctatccaaaaaatcattatttttaagcttaaggtttatggtgttagtaatattgtactcatcctctaatgggtctttgtatataattttatttccactaactcctattccataatatttatcatcattctcaagaaatgttaagactctttttattttaaaattaaaatcactaaccttttccctaataaaataaattaatttttcatctatctctttttgttttcttttatcatcatttttttgagaaaaataaaccccgattgttatgagtatacccagtgaagatagaagagcgaaaaaagcagatagaaaagaaaaaattatgctcaacttatctttaccttgcgcgtcattggcaaatatatcaataacaaaaataccaaaaacaattaaagctattgaagctgttaatgcccaaaaaataatatttttaaactttgaagatagttcaatcattgtggataccattataaatataggaatcatactcacatccatgtgactaatccactgtcaaaatgcctccttaactcacattcatttgttttaatgcttcactaacggcatttaatcgtgattccattcttagatattgagggttgggaatagaaggccagtcgttataccaagcattatcaccaaacaagctaagcaacttaccgcctaaaaaactattgcaacaatcatctttaacatcatctgataattcgattaaatcccaatattcccttgcttcgtatttatctatttcatcatctttgcgtagtttgataacttgctttttagcgtatttagcatttgcatcgttatcatcatctatctcagagattaaattagaatctaatttgcctatccagtagtgattgttaatcctatgaataaactcaattagtgagctacccatcgagccccaaaagcaagaccatgaatcaccccattcgctaattgtgacacggccgtttttattatcgccgtagtcctcaaggtaaacatgaatagggtcgtgacgttctacacccgttatcactaatttagtcacttgagattgttcaactttcatcactccaccttaatcttctgtcttcacataccaatcaacaagattatcaattgcagtattgatatatcctgattgctcttcttcggttaatttatcccattcgtcctcagtaatgcccagcctacattcagagtcagagccaaccttgtttgtccttgcaactaaaaccatctgcttactcatgttcattcctcttattgcatccctgcgagttaattagtccagctgaatggcgccttcttctggatattcagtacagtaaaatacatgcacacgaccggtttctttatctttacgtggctcgatggtgtattcagtctcatcattaatatctaatccgtgaggttctacttttaagccgacaaaatcagccatagccattatttgcttcgttgttaatgtaatagtcatatctatctcctgtttgcatccttgcaaatattccctgagctatttaaatttacgctctatttcttccgctgctttattttcgtaataatcagccgttacgttttctattaaatcgtcctgttctctctcggataatttattaaaatcttcttctgaaatagctatagttagtgtcaccttttcatttgtgcttaaattgcgtattactaagttcatggctatatcctttggttaaacgggtagggattagaagggtatttgatcatcccaatcttgaggaggttcactttgtggtgtttgattactcgatgcttgtttttgtgcttgcggttgctgtggttgaccccatccttgattctgctgtgtcttctggcttcctgcctgattaccaccgttaccgcctagcatctgcattgttccaccgacattaactaccacttccgttgtgtatcggtcttgtccgctttggtctgtccatttacgcgtttgtaattgaccctctataaaaacctgacttccttttctcagatattcacctgcaatttccgctaattttccgaagatgcatactcgatgtcactcggttttctccttcatctcaccagtctgcttatcacgccacgattccgatgtagctagtgtgaggtttgctactgcgccacctgatggcatatagcggatttcagggtcttgccccaagtgaccgatgagaatacatttattcacgcctttacttgccatcagtacctacctcctcatattctccttcaaaaatagttgcattctcttggtctacattagcctctgctttttcgtctaaaatgaccgctttctgcatttcgatagagactggcagatatttaaataagcgacggataacggttttcttcgccatttcttcccagtgagagacccaaggcccattttgaccagccttacttgatgctctgactttctcaatttggttatgcgtcataacttcaaactggacaccgccatctttcagccttgcgacagcgtaaacgtgtgtaattggtgagtcctcattttcacccggcacgtgcgttaagttttcattcagtccatactcaaagtggaaactatcgccttgccttaccgttctggctgaaatgctgattatttgatttgagcgacgggctagatcaatcattcctcgataaccaataattaactgcacatttgattgtcctgacttggattttccatttccaaacgggagcaggtatgcatgaccaagtgcgttacccggctccaatcccaattgtgaacactgcacaacagctccgataaaactttgcatatcacagttggctaattctggtgtttttctgatttccgttgacactattcggatcattctatccggcgtcatatgacgaggaagggcggctgctagctgagctttcatacttggtttattgatacactcaaccaacaactgatctttggttttttcttttacctttgtaccttgtgttttttgcaagtcagcttgagctaatggtgggttactcatcccttaattccttagcccagtagggcagtgataatgtgcgtatgcctgcccattcgtccgtttttaggcattctgcatacgttcttaaattttgtttgtaggttgtccgaccaatatcttttgcttgttggtctaaattgaaaactctaacggggtatctaccgcagtcgatagtcgtgcttacaacaagaaagacaaagacaggagcttcgcctgttaatgatttatatccatctgaataaaaagagtcctgtacgtggtaacgatattcgtacatggagcgatcgaatcgctgaatatcggcagagctttttacatcaataatccagtggtgctcttgaatgagtttatctggcctgcaacgacaaagaatatccgtatcttcatcattccaataaatgctactttcagctactccgttagcttctaagcaccatcttgcgatagggtgcgccattgcactatttctcatgagcattaacttcctgttatcgtcatgagtaataggtgtgataccttccttttcacacatttcgagaaattccttttcctcttgcttccctgcgtttgttctacgatttacatcagggcctatcttgtatcgcttactgtattcatcgggttctaacaaaagacaatggatagcagtcccgaaatccaatgcctttattttttcttcatcaacaggagcttccttgctccaaatatattcggctggcatttcgcttattaaatccaactgagatttactgatccctaatccatggtgatagtcctcatttgaaatgtcgtaatagataccgggcttcatcctaaaacctctttatctatcccgatctgaatagctgttctaattccggctaaaaccgcatccagtgcttggggactaatttcaaatacaggatttaacttccttgctaaatccatgcacagtagttcttctggtaggctatccataacctcatcaactgatattttctcttcctgagaattaacaaacgcttctcgttccatttggcgttcgcaccagtcgtttctgagtccgtaggtgttggtaatcacgcaaccctccttagcttagaaactcgcaatatcctgttaataaagacttccttgcctatcgcattgataatcctttcaagcgattcatcgtcacaatcgagtacatattccattgcctcagctgagtctatttccgtcaatttagccaactcagtgaaacttcctgtctcaatactgagtttgctactttcgtcaaattccatgactgttttgccgtctactacccgagttccgttcgagtagctgtatgaaatttgcataatcacctcaacttacaaatgtcggtattacgccaacggttgttacaatgaccacagctaaactgaataaccatgggcttgtacgtttatttttacgtgcttgaggcgtagtgatacgcaccaccatgccgtcacgcatagcgctgtaatagttagttttcatggtgaccccgttagatgagagataaggcggttatctggtgttggcgaagtgaaggtgtattaatttatttttaatgatttgaattttattagtgtgtttttttattgagtaatgtatttataatcgctttttcaaatgatgatttaattgaattttctccaactaaattatctgagaagttatttagtaataattctaattctggagtttcttcatgaacgtatatttttgtttttacttcaacatgtggtgatttaattccatgttctaaagttaattttacgttaataacgacactggttttttgtttcatcatttttatttccttttaatgaatataattaattacgaaatgtcttgtttatatatctaaatatagggtgggttactgctgaacgagggatgtcatactccctccgttattaactaaacacgatgctaattatcaagcttgagtttttgaattaagttactcactgtggtatctactgcttcctgatcgatggtgtcgaatagcttgttgcgtgcttcttccgctttattacagccttcctcatcatcgtcgtcgtaatctatccataatccaaaatcgacctcgaaaagtttctctggccagcaatattgcatcccgatttttgactcatcggcgttatgagctttcttgattagaatctgacgcccgtgtgactcaaactccttaaaccatatttccatctctatctcctatctattaatcaactcaccacagcccgcagaatggactgtaattagttaactgtgcctgcttttaaccacatcaggcgaggtggttcttacattccccaacataagaaatctgtgtataattcaatcaccccaacataattaaaaggattgaattaatgagtaatagagttatctctgatgacaaccctgttaaacgagttgcttttgatatggcgctagctttagctgctaaacaggattctattaaaacccctgagcaacttatggctgaaattgaatcgctttaccctgagtgtttagaggttgctgagaagcaatacaaaaaagagactccacctccgatgggggttttgctaaaaagtacaatctaagactttaatttctctatctttatgtgatgcatttttaaaaactcttctagcggaactaattccataatggttgttccgcaatttagagttaatttagtgattggtttcccatctgaccaggtatcttcctttattgaagaaatactttctgtcttaaagaaaattcttgttccatcgtttcttagatattcatacatttttaagttaatcatgtttaatcctatctcgccgtaaccccgaacttactgctcggctgttttgttttaactcctgaatatactgctacattaggtaagcagcagttatcaggtgtgtttatttaggtaataaaaaaccccgcggctgcgaggctttagattgattggcgtaaatcaccattttttatttgggtttctttgatgagcatgatttacaactctattcataatgtcgtctttaggtggattgtatattttctcttccctttcttgttttggtagggatagctttttatgtaacttcaattcagaagttgttctgtaagctaccggaccaacaagcggaggaggtggaccgcacaaccccttgcgttcacattcatttatatactctagcgctttccttgccagatactcacctcttctaatatatcgccttgcttttgagtttcttcctttctcaagatagataattttagtcatatcaagccctcgccgtcacttccccgcttggcataataggcttgcgtagacgtaatttcttacgatgttcactaggtgtatcctttaaacaaataattaactctgacaatacatccgtttcatcgactggcttaatgattgaatcccatatttcctcagtagtgcgaccacgattcgcttcttctaaagctttgcgagccattaattcacctctagcgatataacgacgcatctttgaatttgtcttaccagtgcgcggtaagtaagtaatttgagccataatttaccctcggttagtaagtattggtgatgcggtcattggctatcagtctcgaactgtcttgtcagccttgcttgcatcctctgcaataacactactttatttgctggtcaccttcctaagttaatgatcaacagcgttgttattactcgacggactcacaccgtctgacattggctttgcttgcatctggttcagcgtaaccgcatcccaatactcacttggagttttgaaactttcccacaatggcgggagttaatttgtaaaagagcgaacatcctgtttatctatggctccttgccttcgatgtgattaactatacaagcattactttattaagacaagtaaaacttgtgtaaaaacttgggttaatctttatttaaacaataaatgcttgtttttgtttgtgttattttttgtaaaaaatttaaattttttattctgttggcagtttttgtgatttgtgggcataaaaaaatccctcattaaagagggaactgtgatgtggtaggtgagaggtagctagtttttacttgatgttatttctgcgaaatccagtagtgctttctggcaatcgttggtcatatcaattaaggtgctgtttttcttttttgcctcattgctcatgaacttatctataaactcatccccatttggcacattattttcttgctgaaatttatataaagaagagtaagcgttgcactcagatgctttcatgattgtagttatcaatttgaagtcatcttcattagtgatatcaatcttattagtagcatgggcagatattgaagaaacagtaattagtaataaaattatatttttcatttagttactacctgataattaaataaatttctatccatgaaatttgtattttatagattggctaactaaaactttggcatgaatgtagaggctattgatactatcttcttctaaataccaagtttcatatcttgcgttatccgatatgacagccagtctcttatattgcttttgaagcctttttatatatagctgattatctaatacaaagacataaattccatcaccatcaaaaaagttagtggtgatatctacgaatatttgatctctgggctcaaatgttccagccatagagtcacctttaacagtgatcatcttgattgtggatgcagatctcccaccaaacagtctttttgcttcatctgctgaatactcaatagccgttattgtctcaataaaatcatcaagaaccatcacacctggccctgcactagcttggatatccagcatctccaccttgtaggtatttttatctgaaacttcaatatcttgatttatttgaatactactgactttgtttctttcatcaatatcagttattccgaataacaaccaattggtatcaacttcaagtatttcagcaattttaataactctgttttttcttggctcagtactggtctcccactgctgtactgattgtggtgacactcctaccaactcagctaactcagcttgggtcatgttttttgcaagtctagcttgcttgattctttcgcgcatagttttcattcgctcaatatacaagttgtgcttttatttttccaacaagtaatacttgcttaaataaagcgtttcttgtattcttcttgttgttaatcagttaaaggaatatctttatgaatgcattggaaacaacaattaaaaaagcaggtggaattccagctttagctaagaagctaaagattagcgatcaggccattagacaatgggagcaaaaaggtcgcattcctcctgcaagatacgctcaaatcaacgaactattcggaataccatttgagcatttagtaaaagataaaaattagtttcacccgctcttttcacaatttaggttccgccattgtggaacatatcaacaatccgctcatatggaatgagccacggatcattattgtcccttagttaactcataaggactttaaacaatggaatgcgcaaatacacgcaaacaattcaatcaatttatctctaaccacctaatagcttcagcattacaagcattgagaaataaaactcagtctgccgtggctagaacgttaggtgttcatgattcaactatcctacgtcgaactgaaaaatatcctgaaatatgcgaaacgcttgtcgcatcgggaattattgattttgtgatggaaggagaacgaaaaatctcagaagaagagtaccgatttttgtggaaacaaatgggtgaactttctcaaatgaaaataaaagaaaacgcctcgattgcggcaacaaacgaggcgtgttgttcaatggaattcaccatttaacgtacaaatatactgtatcaatatccagtttttatcacaaggggaaacttcagtttcctttttttgatacagctttggaatggagaaattataccatgagacaaagaataaatcatgaatttaatggctgtgatgagcataaaaacatcatgagaaataggctattacaagaaataaccccactgggttgtcagcgtttaaaggaagcattgaaagacgcaaaattaaggaaagcacatcgggataagttattaggagagcgaaaatgagtatgcttctaatggcaaaagccatgcaattacaggtggggagtacagcacaaaaaatggtgctactgaaacttgctgataatgccaatgataaaggtgagtgctttccttcttatgagactattgcacgtcattgcgaaattagccgtcaaagtgcgataaaccacattaaaagtttatgtaaaaaagggtttgttcgtaaagttacgcgaaaaactgataaggtgcatacttccaatttatatattctggatttggaggctaaatctcttgatgacggtagtcaaaatacagtaccacctagtcaaaattctgtaccagaggtagtcaaagaatttgaccacggtagtcaaacggttggactagggggtagtcaaaaatttttacccagaaccagtcagtcttttaaccagtcaattaaccttaaaaaactatcgtctgacgactcgaaacctgcaaagcagatttcaattaatcgacaagctaaaattccttatcaggaaatcatgcaagccttcaacgaatcggtaggggatagattacccaatgccgaatcactgaatgacaaacgcaaacgagcaatatccaaattcctgaaagagctcaaagaacccacagttgaatcagctaaaaattattttgattattttatggaaacggcgagtgcttggtattttggcgaaaataatcggggttggcgagcgaattttgattatttactcagacctgaaacggtactcaaaacaagggaaggagcactgtgatgaaccaagttccgaataatttaatggcggaacaaaatgttattggaggactactgcttgacccgcaaagtgataatgcgcaatcaattttttcactgctaaaacctgaagatttttatgcccgacaccatcaaattatttatctcaccctgcgagaaatgtatacccaacgtatgccaatagacatcatgacggtgacggattgtctggagtcaaaaggccgaattaatcaatcaggtggttttgcctatcttgctgagatggcaagagaaacaccgagtattgctaacattatggcttatgcgaaaaaaatccgagagtgttccgcacagcgttttgttatcgaaaagacggttgaaattcaaaagctcatgatggcgccaagtgagttaggttttacagataaaattgaacaagcacaacgcttgcttgatgaagctacttcgtttggaaaaatggggagaaaaacagggttacgccgaattgatgatgtgctggatgatgtttttaccgacatttgtgatcgacaagataacccagagaaacatcgaggattaaaaacgggatttaaagattttgaccgtctattaagcccgaaacagattgtcataggctcactgttcgtgattggtgctcgtccaaagatgggaaaaacaaccgttctcactgaaatggcaaaaaatgtctcacaacaaggtaagcctgtattactgttcagcatggaaatgacggataaacagcttgttgaacggacactagcccaacaaacccagattaattcagataaattttaccaaaagttagaagagcatgaatgggataggctttgcaatgccatcggtcgccttaaagatgagcccaatatttgggtggatgatacaccaggtatgtccttacagcatattcgctctgaaagtcggaaaattaaacgcaaagtcggtgatattgggttcattggtgtcgattacctcacgctgatgcaagcgggaaaagctgaccgtaatgacattgcctatggtgaaatcactaaggggctaaaaatattagcaaaagagctcaatacggtggttgtgttgcttgtacaactgaatcgaggattggaaaacagagctgataaacgccccgtaccaagtgattcaagagacacaggacaaatcgagcaagattgtgattattggttaggcatttatcgtgatgcggtgtaccacgataatgcagatgaaacgctgaccgagatgattttaaggctcaatcggcacggtaaaacaggcacggtgtatgttgaccaacaaggattgagtattacaccagttgatcaatatatggctgcttatcgcgctcaaccgaaacgagagcctaaaaggtattgtgaaaaatcgttttaactcatgaaagtaaaaaggagacctcgtgacagatgatatctgtctccataaatccaatctcaacagtattttcaaagtgctctccgaaatcgtgacaacaggtaaacgctatcgcatcaaaatcaccgagtggcgtgatttaagaaccatacccatgaataaaacatggcgtatgtggatggaaaccacaggcgagtggttacgtgcacgtggcgttgttatcgatattaaaaatggtgtcggtgaaatcgttttatcaaagcccattactaatgaggaaacgcatgaatatttcgttggacactggttagggcgcaatgaaaacggtgagcgtgaagaaaccagcaagatggataaagcaaggatgctttacatgatggagaaacatgaacaatggtgcattgagaagggaattccgatcatcattcctcgtaactctgaatatatgagtttgaaaagaaagcaagaagaataggaaatagtgatgattatttcagttaataacatgatcgtttttattttaaagtgataaaaaatagtaatcaggaggctcatgatgaatttacgcaatgaggcaaaagggcgtgaatgtcagattagaataccttcagtttgtaatggtaactctgaaacggttgttttagcccattacagaatgtcaggtctttgtggcgccggaataaaatcgcatgacttatttggcgcttgggcttgtagtgcatgtcacgatgaagttgatagacgaacacgatttacggatatggagtatgcaaaacaatgtcatctagaaggtgttttgagaacgcaagccatattgatccaagaagggaagttgaacgtgtgaaggtctttaatatcgaaccagtacctaaaccaaggatgactcaggctgataaatggaaaaaacgtcccccagttttaaagtattttgcgtttaaggacgaagtaaagttaaacaaaatcaccctacctgaatcacattaccacattacattcattctacccatgccgaagagttggagtaaaactaaacgctccgaaatgaacggtaaaccccatcaacaaaaaccggataaagataatctcgaaaaagcattacttgatgctatttttgacgatgattcacgtgtatgggatgggcgggtaacaaaagtgtggggaaaaagggggcagataattatccaagaggtgcgatagtgaatattgagtggatacgcgagcgagtaagtacagcgttgatgaatgtttgtattatagaaaatgggccgttaagtgccatggaggaacaagcaatacttgtaaccgataggtttaaaagaaacccaatacgctatgcgggtgaaagaaagtctcgatacagactcccctcacatccactcaaaattaagcaaaaacatgccaaaggaaaatcaaaaccattaattaatgaagttacttatcgcacttcatcatggcgcagaggtattcatcaattgcctaacgaaatgcgcttatggttactctattgctatggtgattatcaatattatcgtgagcaaatactcattgttccctatatttggcatgagtttcagcgattaaatagtaaaaaaaggataacgaaaaaagttaagcaacgacttcaatctcttaccttactagccattcaggcggtaaaagcagaaattaatcaaacagcaaaaaaatatacggatgttaagcttgctgaattgttgggcgtcagtgctgatgcttggcgaaagagctataaactgtattggatttgtttattagattgttgctatcaattagatagagattcgctattcaaaattagcgctttaagctgattaaaaaagttgcaaaactccgtttttttctataaattaaatgcaatatttatataatattataaatgtaagtatttcaaacctcgcttcggcggggttttgttttttttaaaatatatttataattattaattaaaaaatttgttggaagttttttgttttcattgattgtttgtttatatttaagatgaaatttattgttatcctataagaataaacctgcagtgtttaactaataattaaaataataaacaggtattcttatctctactatactcataatattcaatttatagagcgagtatatataatgattgatttgtttaagttaacgaaaaaaagttctaggcatattggtatagcaatatatgttggtattatagcgggtatcttttcagctttagttaaatctggttttgaagacctaattcccccgagaacacttgaaacgacacccccgccagtcgtcttactcgaaaagcttggattaaatatagatactatgacttatcattggatgggatatagtattaattggggcggtaatggtgttcatatattattctcaatagttatcgctgtgacatattgtgttattgctgaattcttgccaaaggttaaattattacacggtatttgttttggtattggcgtttctgtttttgctcatggtttagtcgtacctctactaggattgtctggctggctttggacagcaggttatcaagcattaatttctgagtttgttggaaccgctttttggatctggtcaattgaagcgattagacaaaatttgcgttattgtttaactaaagaaaatgatgctgagtagataaggaagttcaaccttaatctgttataaatttcttaaagatcgcttaggcggtcttttttcgtatatgccgaccacagaatcaatcaccctcgttatcacgttcacacaagagctgtgagtcggcaccttattaactaaataaattggtaaatgttatgtcaaaagagataagcgaattacagtttagtcttcactatgcctcagaaacagacagtgaaaagaatacctccatcattttaacggcgaatatccatacggctgatggtgaaactcaacaactgacacaattaatttgcacgacatcttccgcaggtaaaaagcaatatcgaatcggcttgcaaaaaattagtgatgctggtgctccattgctggtggcgattgaatcctattggcgcaaaaacacacaagagagttgtgtttatttgttagagaaagcgaagcaatttattcaaggacacttacaacaaacgaatacatggatatctatgtatggtcttgtgattgtttctaatgcgtcactggaagaacagttgcctgaaggtttattaaaggcacttaaagtatcaatccccgcctaatttttttaacactttcacactaatcatcaacggacactcctctgggggtgactatgcgtatggaaaaattaaccaatgtaacttatggaacagcaggcctaacggccttttttgccagtctctctttatatgaatgggtatttgttatcgggatggcgttcagcatgcttctgggtttagccacttattttatgactcgtcgagaacaacgaaaacgcactcaattatttgaagagcttgttcgtcatgttgacccacaaaacccgaccgaaaccttaaaaaagcttgctgaattaatggtgaaagcgccaaaggatatttaatgtctctcaaacagaaaatagcggcgctaacaacagcaggagcaacagccatcgcgttagtagtaatagcccattttgaaggtgtacgttatgaaccttatcgtgatgtggcaggtgttctaactgtttgttatggacatacaggcaaagacattattcaaggcaagagatacacacaacaagaatgtgatgcgttattacaaatcgattttattaagacacaacagcaagtcgatgcattaatcaaagtatcactcgatgactacaccaaagctgctttatattcctttgcttttaatgtgggtacaaccgcatttgctcgctcaacattactcaagaagctaaacgctggtgatagagcgggtgcctgtgaagaaatgaaacgttggatatatgcaggcggaaaggtctggcgagggcttgtcagtcgtcgagaggcggagtcagcactatgtcatggaaaactttaatcatcattatcggctttattcttgcattactcattacagtcgctggtggcatttatctcttgattgataactcatgtactaaagaccaagtgagtttagaaaagcgctgtcagattgcactctcatatcatcggtactaatcatgaaatacggaaaactctatgccgtcattgcgatggtaggcattatcgtgggtagttattgggtgattaactggcaagctaataggattaattcactgacagatatcaacaaaaaactggccgtggctctcgaagaacagaagtctattaatactgactatcaagcacgcataatgcgattaaatcagttggatattcaatatacgcaggagctagcgaatgctaagaatgaaattagtcacttgcgtgatattagtgagcgtcatccagagcgggtgtacatcaaagccgagtgccccaaagtcaaaaccactccctccaccagcttggcttatgcaaccaccgcccgacctactgacaccgctatccgaaattattggttactcagagagcgaattgcagagtcagaacagatgattaaagggttgcaggattatatcaaacaagaatgcatggaataaaaaaaagcccagcatgggtgcatgggcaaactaacaggatattaatcaaagtatagtgataattacttagtatagcttaagtaaatatatatatcagcaattagataagtcgtttatccattaaggagagtgatcatatcttgactgctaggaacagactagaagtggcttggcagtgtatcgctaagctgcgaactctacgcatttcattctgtgcattcaccgcgcaattaaaaacactcacagaaccttacagaaagtcgaacctgagaaaaaccgttaatggtgttttctgtggggcggttatttctggtgaacaggttcgcttttctataaggatttacaccatgagcaaatcattagttttcaaaggtaatgaaattactccatttgataatggtgataataagatttggtttaccagctctcagatggctaagctactcgaatacaaaaatgagaagtcagtaaccaatctatataacgccaacaaagacgagttttctgatgatatgacaatggtcactgaaacaatgaccaatggaataaacaacaacttacgtaagaaaaaggtcaggatcttctctgttagaggtgcacatctaatcggaatgttagctaatacagatgtagcgaaatccttgcgtcgatggttacttgatctagctgaaaaagagtcaaaaccacaaacagggttagcaaaccttgacatgaatgagcttaaaaccctgactatcaatgagatgcaaaatagattagtagcagccgataactggtcgttcgagaactttggcaggaaaggtagtgacttaatgaatttacgcaagcgtcacctaaagaaaatacgcaaagcgaagaaggcaattaaagaactatcacaattaaccttgcctgatatgggcgaatttccagatggagaagagccagcatgaaccacgaacaattcatagagcagaacgtactagccgagttaaaaaagctcggcttttctttacctgtttgtcgtagagcaagttacatggcggtagatcattatcgccgaagctctcaagcaagtagaaaagggcgaatgtttgacgactgcttacatattgccaaagtgtgggcgagtaagttcgctaaggagaaagtatgaccaaacaagaaaaagcaaacttatccattctctatcgtcaattacagcaatcacttgaatacttacactgtggaagagttgatgatgggagaatagttgctgaaatcgtcgagcgcgagttaggcaagttagtcaacaaacagaaaaccaaataggccctagcggccttttttatttaaggaatggatatggctaaaagaccagattgggaggccatcgagtcggcttaccgagctggcgtgatgtccataagggaaatagcctctcaatacgagataacccatcaggcgataagtaagcgtgccaagaaagaaggatgggagcgagatttaaaggcaaaggttaaggctagggctgaaaacttggttgccaaaagggaggttgccagtctggttgccaccgaaaaggctatttcagaacggcaacttattgaggctaatgccgaggttatcgctaatgtccgcatggagcatagaggcgatattcgaagggctagagagttaactaataacttatttgatgaactatctgctgaatgtgctgatgtgccagccttaagaaaacttggcgagttaatgtttagtcctgatgataacggacgcgacaaactcaatgaaatttatcactcaatcatctccctgcctgagcgcgttaagtcagccaaatcattaagcgaaacatttaaaaatttagttggccttgagcgtcaagcatacggccttgatgatgttcagccgaataagacagctagtcagctatcagaactaatggacgacttatctaaggaataatcatgaagccagaacatcttgcattattgagagataagctctggcgattaaatcacctctactggataaccaataaagaaggcaagccagttcgatttaaaatgacgcctgagcaactcgaatattttgaagggatgcacacgcgaaacattatccttaaagcccgtcagcttggcttcactactgaggtctgcattatccagctagacgcagcgttatttgaggcggctaaatgtgcattgatagcccacacacttaacgatgctaagcggctatttagggaaaagataaagtatgcctatgacaagctacccgatgaaatcaaagcggctaacccagcgagtaatgatgcggttggtgagttggtgtttagcaaaggcggctcgctttatatcagcacgtcatttcgtggcggtacactccgttatttgcacgtttctgagttcggtaagatatgtgctaagtatccagagaaagcccgtgagattgtcactggcgcatttgaggcggtatcaagcgattgttttacgacgattgaaagcacagcggagggtcgagcaggttatttcttcgattattgccagtctgctgagaaagcgcaaattcagaataagactctctctaacctagactggaagttctttttcttctcatggtggaagaatccagagtatgccattaaccctgttgagccattaccccagcggttagttgattactttgatgagatagccagcaaacatggtgttcaattaaacgagcgccagaaagcatggtattacgccaaagagaaaacgcttggcgacgatatgaaacgggaatacccgtcaataccgtctgaggcattccaacaatcggttgaaggcgcttactacgccaagcagttccgcttcctgtacgaaaataaacgcattggcacacttcctgataactcgcacttaccggttcacacgtactgggatattggtgtgggtgactcaacgtcaatttggtttattcgtgaagtgggcgaggagttccacattatagaccactactcaaacagtggtgaaggtctacggcactacatgaaagtactgaaagacaaaggctacacatatgcaagtcacaatggccctcatgatatcgataaccgtgagtttggctcggatgcgaaatctcggcgtgaattagcgcgtgaggggtacgaaatcgacggacaaatttactcaatccgatttgaagtagtgccgaagctttcagttgatgaaggtatcgaggcagtacgtgaaattctgccactttgcgtgtttgatgagcataaatgtagtgaaggcattgctcatctagaagcttatcgtaaagagtgggatgacaagcgaggctgttggaaagataaaccgcttcacgattacacgtcacatgatgctgatggatttaggtattttgcggtgagcagaagaaacactaagcgcccagcattcgaaattaacctaggaacaaccttctgatgagtacaacaaatgtagatttcactcgaccggagtataaaacggctgctcctcagtgggagttagtgcgctctgtttgtcgaggtggtgaagatataaaaagctatcttcctgagcttgaagagcaagatagtgagcgtaaaaagaagcgcaataaagattatcaagaccgtgcggtgttctatccaataacgggcaatactcgcaacggcatgatagggatggcatttaaaaaagatcccttagttgctgtcgtcgaaaagctgtcgtgtttaaaagacgatgctgacggggcgggttcaagtatctatcaattggctcagtcttcacttgagtcagtattggaagtcggtcggcatggtctgtatgttgattacaacagtgattcgaaactcccgtacatattccaatatcgtgctgaagacatcattaactggcgtacagctcgtattaatgggcgcacgatgttaacgctggtggtattgcgtgaaacggtggaagaagaggacgggtttggttttaaggatgaggttcaataccgtgtattgtcgatagaagaaggtaagtttgtctgtcgtgtctatcgcaagcccagtggaagtagcgtttttgaaatttcttctgagtatatacctgcgcgtgctggtaacggtgtgtggaatgaaattccatttacatttattggtgcacagaataatgatcacactattgatgaagccccacttctaggattggcaaaaatcaacctagggcattatcgaaactctgctgattatgaagattctgttttcttctgtgggcaaatacaaccttatctaggtgggctaggaacagaatggcgtgactatctagaaaagaaaggcgttatggttggttctcgctcaccaattatgttgccagaaaaaggtttctttggttacgctcaggctcaacctaacatgctggcaaaagaagcaatggacagtaaacgcgattatatggttgcgctcggtgctcaattggtttctgctgatagcaaagttaaaacggttattcagtctgtcggtgaacagaacgcacaaacctctatcctgagcatctgttgctctaatgtttccgatgcatgcagtaaatcgctaatatggtgtgctgaatacttaggtttagatactgcaggcatttcgtttgagattaacaaagacctcgttaatcacattgccgatagttcgatgatccgtgaaatcgtcgcagcatggcaatctggcgcaacgcgtaaatctgacttagtgagaagtttgcagaaatatgatgttatcgaccccgctgatgatgttgatgtggtggtggatgagcttaataatcaagagccgacaatggtaggtgagacatgagatcagtgaatgagcggttaatggatgaattgattgctcactccctgttttctggtcgctattctacaggggtggctagacgcatgataaaggcacttaatgagtttgatgctgaattaactgcttcacttatagtgtctttagatgatacctccatcgatgttaatagtttcactgcaaggcgattggagtcgttgctgtccagcgttagaagtattaataagcgtgcagttgatagtgctttttcattgttaacagaagaaatgagagcgcatgcattatatgaggctggctactacccatcactgtttgatgctctactacctgatgttgttctacgcaaatatccactaatgagcattacagaggaaatgctattttcctcagtcatgtctcgcccatttcaagggaaattactttctgaatgggctgatggattagaatcagatcgcatgacacgcataaataacgctgttcggaatggttatttaaatggtgatagtgcggtagaaatcggacgtaaaatcagaggacatgcaaaccaaggttataaggatggcgtattgcaactaagccgagctaatgcgacgacaatagctaaaacggccattagccatttacaagcaacagcgcgagatcagtttgctgatgccaataaagacattcttgattgtaaacaatggttatctaccctcgataataaaacatctcacgattgcattattcgggataggttgagatacacgctggaaggtaagcctattggtcataaagttccttatctacaaggccccggaaaaatccacttcaattgccgctcaacagaaacgctggttaccaaatcgtggcgtgaattaggtatcgatttagatgagatggacgcaggaactcgtgcctcaatggacgggcaggtgccagcagataccaattttcttgattggatacaacggcaacctgaatggcgacagcgtcaagttttcggagaaacgcgattcagactaatgaaagagggcggtatgcatccttctgagttttataccgataagggagagtttatttcactagagcgacttagagagatagatgggcatgcatttagagaggctggatatagctaatcaataaaccatttaacaaggtcacctcggtggccttttttattacctaaactcagctcagggctgagttattacaacgcgctaggcgcatctaatcccaaggggaatcacatgttatttatgaatatcgaacgcaaatattattcacaggctgatgatggttcgcaaggtggaggtggtggaacaccggaaatcactccagaaattcaagctattatcgaccagcaggtttcagggctaaaggctaaaaacagtgagttgctaggcaagctcaaagagcaaggcgataacctgaaacgttttgaaggcattgacccagacactgtgaagggcatgcttaaacgctttgagaatgacgaagaagccaagctcattgctgatggcaagattgacgaggttctcaataagcgcactgagcgtttgcgtggtgatttcgacaagaagttaaaagaagcaagctctaaagctgaaaaggcagaggcgtttgcaaataaattccgtgctcgtgtgttaggcgatgaaattcgttttgcagcagggaaagcgggtgcattaaccagcgctcaagaagatttaattttacgtgccaaaggcatttttcagatcaacgatgaaggtcaggccgtagccgttgatgaagatggcaatccaatcatgggcaaagatggtcgcacgccattatcacctattgaatggattgaatccctaaaagaaagtgctcctcacttattccccgcagcctctggtacagatgcagggaaacataaacaaggtggtgcacattttaaacgttctcaaatgtccgccagtgacaaggctgattatattcgccgatacgggcgtgacgcatatttaaaacttccaaaagagtaaggaaatataagtaatggctacgatgactaataatgatttagtaatttataacgatttagcacaaactgcgtttttagaacgccgtcaagataatttagcagtatttaatcaggcatcaaacggcgcaattgtgctggataacctttttattgagggggacttccgtaagcgtgcattttatcagatcggcggttcgattgagcatcgtgatgtaaactccacagcatctgtagagaacaaaaaaatcggcgcgggcgaatctgttgatgtaaaagcaccttggaaatatggtccttatgcaacgacagaagaagcatttaaacgccgtggccgtgatgtatcggagttctctgagttagtgggtaccgatgcggcagatgcttcactagagggttatatcaaatactctttagctgctttaggtgccgctattggcaataacaaagaaatggtggtgactgcggatattgcgacagatggcaagaaaacactgaccaaaggtttacgcagatatggtgataagttcaaccgcgtaaatctgtttgttatgcactcaaccacctacttcgatattgttgatcaggccattgacaacaaagtgtatgaagaagcgggtgtggttatctacggtggacagccaggcacattaggtaagcctgtgctggtaacggatacagcgccagtagatgccatctttggtttagtgccgggtgctgtgactatcactgaatcccaagagccgactttccgatcttatgaaatcaatgacaaggagaacttggaagttggttatcgtggtgaaggcgtggttaacgttggcgttctgggctatagctgggatgaatcaaaaggaaaaaaccctgatttaacacagttaggcaccgcaggtaactggaagaagcatttcactagcaacaaattaaccgctggcgtcatgattaaactgactgccgaagagggaaagtaaccctgtcagcggataaaacgtccgctatcgctgacagtacagatacagtaacgatcactcttaattacaccaagggcagctctccagtcgaaggagctaccgttaattggtctacaacaggtggcaaattaagcgttacttcatctaagacgggcaaagctggtggtgcgacagtgaaattaacttctgattcacagggtgaatttattgtcacagccactgttgatggtgttgcacaaaatactgatgcaattacattcacagaaaaaacttctccagacgagtaatttaaggggctttgtgcccctcttttttttgaggtgagcatgattgatcctgataagaactctccaatatttaatagctacgcaagtgtggatgatttgaagaaatacgctgaggatagaaatatcactttggcagatagtggactagaggcattactaattacggcgatggattatcttgaatcgcaaaaatggttaggtaaacgaactaacctaaatcaacctttatctttccctcgctcagggctatctcgcgacggtgttgccatcccaagcgatcagataccaaagcaattaatccaagctcaatgccgtttagcgattgaatcagtagaaaatgacctacagcccacgttaggcgctgaaatcacctcagagcgaattgagggcgctattactgtgcaatatgccgaaggcactaatactggcgcaccaaactttccttggttaaaaggtttattgtctggcttgattgatgtctcggatggatttgccattaatacatttgcaatgaggtagccatgaacatttatcaacgtgggcagagtacagcattaaggatgttgaaaaaatatggcgtttcctatcaggctaagcgtgatggtaagcattgggttgatgatgaggggcaggaacactttgagccagaaacgttattttctgttgtcggggtaaaaacgcaatataaaccttacgaaatcgatggcacgcttattctctctacggatattaaaatgatacttcctccagatattgatattcagaaaggggataaggtgcttgtcgatggcgtttggttgcgcgttcatgaaccgaaccctgttaaacccgctgatattattatctgctatcagtctcaactgagggcgtgacatgtcagatcagttcatgaagtcgattaatatctttatcgacaaatctaacgcaaatattgaaacggttgtcaaaaatacagggtttaaaatattagcgaagcttgttgatatgtcacctgttggaaatcctgaattatgggaagttaatagggttgcctcaaactacaataaagcagtttttgaacataatgaatatctaaaacaagatcctaataatttaacaccaaagcgacgtcaattaaaaaagcgtgttcgtgttaatgactctatggatatttatgttcctcctggttatacaggggggcggtttagaggtaattggcaggtgtcatttgatgccccagcggaaggcgagacggggcgcatagataagtcaggcaatatgacaaaggcgttaggcaacgttgttattgaacaatttaaggtaggaatgaaagctatctatttcacaaacaatgtgccttatgcttaccgccttgaaatggggcattcgaaacaagcacctaacggtatggttgctgtgactgctgaggaatttagtcagtttttcaactctgccgtatcggaaactaaatcatgaatcagtcgacaattaatactgaaatacgaaagctggtggcgagcattggcaaggatttaaatcttaaaatcgcatggcccaatcttccttttaatgatattaacgatccctatcttcaactccatgtcatgccagcagaaacggataacatcgggttatctctggatatgcctgtttatcgtggtgttatccaaattaacgtagttgggaaagtagggggtggggacgctaagatatcaactattgctgatgacgttaaaaacagattagaaaatggattaacattaggggagggtatctacattaacggagagcctagccagttccctccaatttcagatgaaacaaattataccattcctattcgtgcatcctatcgatgtaatgcaatccgataacaccgcttaattgcggtttttttatacctaaaatagaggttaacaatggcctataacattcctaatgggtcgcgtgtttacgtcgcaagtaaatacgatgacgaaattaaaattaccgaggcaactaatgccgaagaagccgtactaacagttgatgatgtgggtgacattgctaaaggcgatattgttcatgttacatctggctggaaaaaagcttcgggtgctttccgtgttgcaagtgtcgctgaatctaaaatcaccttagaaggtgtcgatacaagtgataaaaatgtgtttcctgctggtggcggtacaggaacattaaagaaagtattgtcatgggaagtcatgccacaggtaatgacactttctacagaaggtggggaacagcaaactcaagaggttcaatttcttgaagatgagcaggcagaaactatcgatacctataaaaatggtgttgtacaggtttatacctttgctcacgatgctaagctgcctatccgtaaattgctaacaaaattggacgacagtaagcaagttactgcaatccgattcttcaataaacgcgcagaagaagatcgctattacacagcttcaatttcattccagcgtgtgccaaacactgctatcaacgaagttgaaaacgtaacagcgcgattctcacttaaatctgaaatgcagatttataccaacgcatcttaatcaataaatactcacaacagccccgagtcaggggctttttaaggactaataatgcctaaatttacactcgtcccaaatccaaccttcaaagctaacgttaaaattcctgttgccggcaaagaaaagccagaagtagttacattcacatttaaacatcactcagtaagtgagcttgatggaatgcgagaaaaaccgatttctgagttctttgagcagattattgctgactgggcgatcgaagagccatataacaaagaaaatttaaacatattgttagataactacccttcagcctctcgtgctatttcatcaacatattacaacgagctgctaggtaaccgcgaaaaaaactcctaacggtcgccgaggcgatgtatggcggaatgagttcaaaagaatcggctgagttcgagcgagcttttggctttccgcctgacattgatgatgttgaggtgtggcctgatgtttgggattcgtatcaagtattttcagccatgaatacacagtggcgcgtaggtatgaatggtattactggcttggattacaacccattaaaccaaataatggacttactcaacatcaaagatagagcgaccgtttttagcgatatccgcattatggaagctaaggcgttagaggtaatgcataaaaggtcataataatgagctgatcagtggtaaacgccggttggtgagtaggaagagaggataaagggaggctgcgagcaagaatgcagcacatagtaattagtttggcttaaagcttgacctagtaaataaaatgtggatcaagttatggacaagtgatacctttctgatatcataaaaatatagctatacacattgtatagtcatttcacttacaaaataataacggaggggattatgaaaaagttaattcgagaatttcttcgtgtaattctctcagttgaaaaaataaccaatccaattattggtggtaacgatcagaaatctaaagacgaaaaagaggctttagacaataaagataatttctttgttggtcgtgatggttcgatatcactaaatcctaacagtatagttgtccagaaggcttttaaagacaacatagaaaaattacagtcaacaaaagggcggtaattcttagtgtgggctgctgtaattgttctcgtcttggtttgtggctataactatgtagataatcatttgccgtcaagatataaactgaataattctgttggttggaacgcgtacttttttgtagcgctcaaaggcggtgagtttttaatacaagggctgatggcatctgttgtggttgccattggcctttatattattatgtatatattgaatgcgccatcttatctttttggttggtatgagcctttcacatttgtagactctattttcaatatcagagtttctggtatgagtttttggactatcttgtggttatcttttactgttttgatatctatcggaaagactgctgatgttaaaaaaagaaatcaatccctacaaaagagaatggaagactttagggaagtagcaaaagtttacgccattgaaagtttgctactggagtcatttgaaagaatggatgatggcttactggtttttgtgactctcaagtctagaaaggtttatgttggaatggttgatggcatcaggtttgaaggaatggatatcaatacgctagtgttaataccgttcatgtcaggatatagagagaaagatacattaacattccatgttgagcacaactacacagatcactacgcgcaacaaggaataaacttcagctcagagccgttatcagtattccagtttagacatgtcttaccttatgagcaaatagagtcattttcgttatttaacgtcaacacatacaatgtatttcaagaagtagcaaaagaaaaagagataaaaaagaaatcagaaacagattcaaactaacccactccggtgggttttttgttgcctgaatatctcaaattattgatattgtttgattgttctaaattgaaatgaccgacctacaaaataattgtaggtaactacaaaagttttgtagttcaaatattgagcgactcctaaagggttttacaaaaaagttgtaaaacttatcttgtgtaatttattgatatagtttgattataacgaatcgttagaattgatagcccgtccttgggcgttactactattgttatgcaattaacggagtgtttaaaatatctccgcttttctcaccttgcataacttgggtgcgtagacggaagttttgcagtaactcaataagcgcattagagtcacgttgtaatttttgaatgtattcaacactgacaacgttatgaccatcaacgctaactacttgttgcttttcatttttataagaaaacaaccatcttccctctttgggtatggttacagtgattgagttttgatttggctcaaaaagtatattttcttcctgtttaggaatgtattcaccctcaagaacgaacttgtgaatatactcaaccgcatcgggtatctgatctgctgttagctcttcaatgctactaacattaaatttctggtgaacaagagaataggcttctgggtacataatgcctttcttactaaccagtagattaacagcattctttaatgggttgcgttcttgaacagttgatttgtgttttttcttaacttcaccagtagtccaatattcataaagtacgtcgtcacactcttcttgatacttgattactttatcgcggatctctggtttgactttgttagggctgatagtgtgaagccagcctgcaagtttacggagagctaggcaaagcattgattgctcaccgccttttgaaggtatcacgatttccgtgatccctttactaaacctttgttttagcttttcaaattgagattgccaagttaaccccatgccttcaactattggcttcattggtacatatggttcgccgttgaaatttactacatacaggttgttaccgtggaaaggtacgttaattgttgatacactagtcatgtcggttactccgtagtttctgacaaattagaagccctagctaccgcaaatagttggggcttcgctgttttagttgacacgtttttctctttctttcacataccaagctatcgcttgattaactattgagttttgcgaaataccatctttcgctgagagttctaccactttactttttaacacctctgttaatctgagttgaaattttcctgtttttttattggtattcatatcttcatccttttatgtgtctatgtgacatcacaaagatatcaatgtgaatctatatagtcaacgaataattgactatattgtgatatcacaatgactttactggtggttgtatgtcacaaaaaaatacgagaataagagatataacgccttatagccttagaatgcctgatactctgaaggaaaagttaatgcaaagggcaagtaagaatgggcgatctcttaatgctgaaatggttatgattcttcagtctgccgtggatgaggataacacccctaaaaacttaaacgagttgtcacagcttgatcctgaaaagttcaaagaactgttcatggaaactatcaagaagatgaatgagggtaaaaagtgactaatatcacattttattttgttgttactgtataaaaaacaggaatgtaaaattttttagtgcctgtaatatattttgatattttctttggagcttgcacatgaatgcgcctgtaattagctttattaatatgaagggtggggtgggaaagaccactctatgtattagtattggtgagtatttagcaaactataaggataaaaaagtattaataatagatattgatcctcagtttaatgcaacacaatcttttatgggtaagcatgataaaataagtgagtacttatctttagtaaaacaaagaaagacaatcaagagaatatttgaagtaaatgcttctatatatgatgaagatgcagtattaaaaaaagaagatgttatttacagtgtatatccaaatctagatataatccctggtgatataaacataatgtttgagcataacacggtagatacaattagattgattaggataagaaatttcattgaagacaataagttaagagaaatctacgactatatttttattgattgtccgcctaccatttcgatgtataccgaagcgtccataatggcatctacacattatataatgccaatgagaatagatcagtattcagtattagggagtaacaatttgctatcaattgtttctaagctggctagagatcaaagacttacaataaagccgttgggtgttatttataccgatactgcaccaaaaagattgaccaagaagaccagagcaattaagacggctatagaaaccgaaaaaggaatcagggatctatatttcttcaagaatcatttttcaaaggttagggatttacaggttggtcagcaattaaattttgcgtcagcgtattctcagtctaaagaaatcattgatagaatatgtacggaactcgaggctaagcttaaagaggttgatgatgaatcagaataaattaataactaaaaagaaattaatggaactaaaagattctgaatcgcttgagtttatgatcgggtttctatctttagtaatattttccaaagaaatttttaagtcgaattttgaattgagtgaatttattaaagatgcatttaagatagaatataaaagatacgttgtatcctcaagaacccttatgttctctaggcttgcgaaagatatagttagaaaatattctgatggaaatcatttcacagctaaaaatactgttgtcaatatcatttatgaaaagctagatcagctgccaatcaacgatatcgctttagaagcgaaaaagaaagaaaataaaaagagaaaaggtaaaaatactacaacagaaagtatctcaaagtggataaaggggtttaggggtgagtaacttccttactattgacccttacaacgtgttgggaacagtgtccaagttcaaagaagacctaaaagtaattcctgaccaatatgttgttgactcgttaatatcagcggtaaaaaagtctatttttttgaagataattcacgaaaaatctttgagaggtaatagacacttattaagcgtcatctatgattttttaggttgtatttcagcaataaaaaaaaatgaagatagatacttttattttaatataaggtcatgcattgaaaattcaattagattcttgttgaacaaagataatgatgatgagatcggtgttacaaggatgttcagtgagtttaaagaaagatataaaggtgtagacggtgttagcgcacttactagggtatattctgatgcatgtaattacgttcataacaatgtcaaggctgatattgatgtatcaaaaagctataaatacattgattcatccaagatttttgaaaagaaaaaaagcagaaatctatgtaatgacctcgtttcagtgcagtcgtcactagataattttttgctaattaataataaagaagacataaagtattcatttttatatctaaatgaaaatatagaatatttaataaataaaaagtttttagaaagattgttctcatcagaattggtatcataattctataaacatgcttcggcaggttttttgtttgcttcaatttgcgactacactcagctaacattaagaaaactaaataaagaactgagaggacgggatgaagaagttattgaatattagtggggtgattgctttgctggttagctgcttgttttttagcacaacaacgttagcagtagagaaaaaaatatcagccccatttggattaaaatgggggatgacatacagtgatgtgctcagcaaaactggaaatataaagttaattggtaatgaaaaaaatagagtgaaagagtatctcatcaaaaatgattcctcattaattgatggtctggatatgtacagtgtaagtattgacgataagtatggattaattaatgtagatgcattgatttatgtgtatgacgatgatgatagtaaagttattgagaaatataacatattaaaacaagcattatcttcaaagtacagtgaacaatattctgaagaatacttatggaagaatagaacaagaggaatgcttactctaccagaatgcctaaataatgagggttgtggtaaatatgtatctttgtttcaaggtaatgactccagtagtgttatgattatgttgaatgccactggcgataataggtcagttattatatctttgttttacaaatctgaatttattgaaaaaataaaacaagaagaaaaaaaacagaatgaaataattattaaggaaaaatcagacgctttggcaaactctctataataccatattctaaaatacaaccaccttcgggtggtttttttatatctggaggaaattaaatggcagatatagcaacaatatcattaaaggctgatacgtcagatctggagcgtggcacacaaaagttaaaggagttcggcgatacagcagagaaggtaagcggttcttcgcgaaatttaaatgaccagtttaatagaggggttgatcatcaaaagagagcagccgacgcgataaagaggcaaaagaaagaacttgatgatttattaaattcaataaatccaaccaataaagcatttgatgcgcttgataaagccactcaaaaattaatagaggcaaataaaaaagggatattaccaaaggatcagtttgcagactataacgccatacttgagcagactagagataaattaacacgagttaatatgtctcttacggctgaagggcgggcgctattagctcaagaggcggcaacaaatagagccaagcaagctgctgatgattttttaaattcactgaaaaatcaaactgaaattataggcaaaacgaggacagagattttagagctaaaagctgctcaacttggtgtgtcgcaacaagctgcgccgatgatcaataagctaaaagagcaagaaaaagcctttatgaatggctcaattaccattggtcaatataaacaagcaatgcgtcaacttcccatgcaaatgtcagatattgttacgtcattagcatcaggaatgccagtctggatggtgatgatacaacaaggggggcaaataaaggactcatttggtggtgtcggtaactcactaaaagcgttagcatcacttattacccctgcaagagttgctatgtttggttttgctggtgctgcggcagctgtggcgttagccgcgtataaagggtcgcaagaatttggcgagtataataagcagctaattcttactggtggttatgcgggaagaacagcggcacagctagatgctttggctagaagcttgtcggggaatgggatcgctcagtatggaatggctgatactatctcaaaagtagttggatctggttctttctcgggtcgagatgttgatatggtatctaaaactgctgctgctatggaaaagaccgttggtcaatcggttgatgagacaataaagcaatttcagagattgcaagaagatccagttaaagcggtcactgaattagataagtcattacattttttaactgctacccaattagaacaaataaccacacttcagacgcaaggaaaagagcaagaagcggctaaaatggctatggaatcatatgccaatgctatggatgagcgaaccaaacagataaaggaaaatctaggccaccttgagagagcgtgggaaggggttaaaaacatggctagtagcgcatgggatgcaatgctagacatcggcagagagaatactctagagcagcaaatcaaagagtatgaagaagctctgattgagtttcaaataaaccctgcctccaaggggctgtattataacaagactggattaatgccagatgaagttaaaagtaaactcgctctactaaaagaagaaaaatttcaacgtgacattaaaaacgcaagagaaaaagccgcaagagatgaggaagagcgtaaaaaagcgcagtttagagccgatcaagaattaaagcgacaatacgaaaccgcagaggaaaagcaccaaagactactcaaggagataataaataatgcggatgcatctcaagctgcaaaagatgaagccatccgccgagagaaagagcgttacgagaaagaaaaagccaaaggtaaaggtaaaaccccaacctaccgaccagattatggtactagagtagatgaatcagcaaatcaagccctattatccctacaagcacaattaaaggtgctaaaagagcataaaacagtcagtgatgtgattagctctgagcgtaaaaaactttgggatatggaagcgaaaatatcaatccttgaggaggctcagaaaacaagacagttaaccaaggacgaaaaggcgttgcttgctaaaaaggactacattcttgcttctcaagaagcattggccatagctggtgatgaggttaagcttcaggagttacataatcgtgagttagataagcaacttaaacgcgttgaagaaattaatgccagaagtcgcgccttagagttgggagctggtaagtctggccgcatgtatcaacgagacatcgcactagagaaagctaaatcaccagacgagagaaaagccttagaggagtattatgctaaggaagactctattcgtgctaactgggagttaggcgtcaagaaaggctttgctgaattccaagatcaggcaacaaacgtttacggtaacgtagctcaaattagtcaatcagcattccaaggcatgagtaacagtctctctgattttgtattgacgggcaaagctaattttgctgacttcactcgctcattcttagaaatgaccaccaagatgttaatgcagatggctatgctaaatgctatgaaagcggcatttggtggtaatgcggtaggtaatttctttgggtttgcaagtggtggttatacaggcggtggtggtaaatatgaccccgctggcgtagtgcataaaggcgagttcgtctttaccaaggaagcaacgcaacgattaggtgtagataatctctatcgactaatggatgcaggaaagagaggttatgcttcaggtggtcatgtcggtggttctgcgccaatgtcggttacacagccaacagcatttatcgctcgcaatcctcaaattgctggtggtggggtgaatgtgacaattgatatgagcggcgtcaagattgaaaccgaacagcaacaaagtgcaatgccaaatatagatgtgagagctgctgagcaatcgttaaagaataaagttaaaagcctttttattagtgaagggcgagaaggtggtgatttgtacaagatcattaaagcagtatcaggaaatagataatcatttaataagagaggtatttatgaaattaaaattaggaaatatttgtattcgtccagaagataaagaaattagcattccagtagatgtatacatgggaaatgaagctgattttgaaccaccaaaagcatatctggtttatcaaactagctttgatgctaataagcctctttcggaatattttaaagaatccgaagaatatgcaagaaaaacaattaaagaattaaaccaataacagccaccaaattctgtggctttttaatgagaggtagttatgaaaatcaaagtagagttcccattgttatcaaacaaattttcaggagtggaaattacaggggatgtgaaaagatatggcattggggctataaaaataagtgaaaaacctatattaacgtcagaaattacagtaacggagatagtgggaaataataccccagatgaagaaccaaagttacaatttaagtacacagaggattataacccaaatgaaacatttgcttcatttatggggagagcggaaaaatatgcaagaaccatgatagatcgcataaaggcggcacagtaaccgcctttataatatggtactaattatgtaaatgtgactgaatgataccaaacgcctcgatagttacaggactatcatgcgatactttatttaattcactaataagtttttctttttcaatatcagacatattcctaatcattacttgaattatatactctaaagcaagagtacgtgtttgaagggtctctatgtctttagccatttcactaactaacatattcaattctccatcgaagtaagtcagccattccttcggtaagtttctctgggctgaatatataaaataacctaatggatatttattaatatcctgatatttgatcaggcggctttgtgtcgccttttttattggagtaaccaatggaagagtttaaatggcgaacacaaatacaagattcgccaagcggtgagttcaagcatcgtattaaagaagttgaatttggagatggttacaaacaagttgctggtgatggtattaatccagaatctcaaacgtggccattctcttatatgggattgaaagatgaggtgatgcctatttttaaattcattcggcaacacacagtaaaatcatttatttggacacctccatttggtgaaaaaggtctttatcgagttaaagctgattcaatatcgatgatccccatatctggcggagtaatgaaattgtcagctacgtttgaacaggcatttagcgcatgaatatcacagcagatgtacaaaaattagagccgggtaataaggttcaattaattgaggtggatggcagtggttttgatgggccaattcttcgcttccatgcttacaatcttcctcacacaccagaagagatagagaaatctaatggtgatatcaagccaaaaccaatttggtggcaagaaaatgaatatggggcatggccctatgaagttgaaggaatggcaaagaatagcgacggaagcccagcgagaccatctctaaaggttgccaatatagatggcttaatctcatctttgtgtctccagcttgacgatatggtgcaagcaaaggttactatttatgagacattctctcattatcttgatgccaaaaattttcctgatggtaatccaaccgctaaccctgatgagtgttttaaacaggtttattacatcgatcgtaaaactaatgaggtggctggcgaatccgtagagttcgagctgtctagcccgtttgatttgcagggagtaatgatacccgttcgacaaattcataacctttgttattggtgcatgaaaggcgattatcgcagtggtaatgggtgctcatattcagggaataaatattttgatgagagaggaaaccctgttgatgatccagcgctagatagttgtggtgggcttattagtgattgcaaaaaacgctttggtgagaatgagccattagattttggagggtttcccgctgcggggttaacgagatgatcacaaaaaaattaagagaatcgatatttgaacatgtaaaagccgaatatcccaaagaagcttgcggaattatctgtcagaaaagtcgagttaaaaaatactttccttgtagcaatctttcagataacccaacagagcattttgagctttctccagaagattacgctcttgctgaggactggggtgagccaatagcaattgtgcacagccattgtggtgatggtgtaacgactcaacctagcgaaatagataaattacagtgtgatgcaactggattgccttgggtgatcgcatcatgtccagagggtgatattcgaattatttaccctcgaggtgagcgtgaattagaaggacgtccttttgtgctgggttatgctgattgctggtcgttaattatggactattatcaccaaaaacacggtattgagttacataactacagcgttgatcggcattggtgggaagaaggcgaaaacctgtatacggataactacgagaaagcgggttttgttgatatcgctggtgaaccaaaagaaggtgacatgattatcatgcaagtgcaagccgatgtacctaatcacgctggtgtgattatgaatggcatgttacttcatcatctttatggtcaactcagcaggttggtcccctacagcgattattggcgagataggactgtaaaaattgttcggaggaaagagtttgtatgagcctaaaaacaatacgtctatatggtgttcttggcgcaaaatttgggcgtgaacacaaattagatatagattcacctcgcgaagcaattaaggcactctctgtgctttatgatgggtttgagctgtttcttgctaatgcacatctgaaagggctggagtttgctgtatttaaaggtaagcgcaacattgctgaagatgaattacatcttgataccaaagaagagatccgcatagcaccaatcattaaaggaagtaaacgaggaggattctttcaaactatgttgggcattgccatgatcggtgtcgcgacatttgctccttggggtactgccttatttgcaagtgacttgattggggccataggtcttggtgtggcgcttggtggtgtttaccagatgctttcaccccaaccgcgaggtctatcaatgaggcaagattcagataacaaaccatcttatgcctttggcggagctgtaaactctactgcgcaaggaaatccagttcctttactttatggactggacaggcgagaggtaggtggggcaatcatttccgcaggtatttatacagaagatcagcaataacataaacgaatttcagaatagccactatgtggctttttttatgggtgaaatatggaattaattcatggtgcaaaaggtggtggcggtggcggacatacgcccacggaatcaccagatagcttactttctgaatcaacagctaagattttattggctatctcagaaggtgaaattgctggtggcttagacgatactcgtatttttcttgatgatacaccgattggcaatgcggacggtactaagaattttgagggtgtcacttgggaatttagaccgggtagtgaacaccaagaatacattcagggtatcccatcagtagatagcgaaacatcggtagggttggaattaaaagacgatcagccctatgtgcggagcattaataacactcagctatctgctgtgcgcattagactatctgttcctcaattgtttcaacaacacgataacggggatactacaggctatagaattgaatatgctattgacttatctacagatggtgctggatataatgaagtattaaagtctgcttttgatggtaaaacgaccagcgaataccagcgaacacaccgcattgacttacccaaggcaaatacaggttggcagatccgtgtccgacgattaactaagaatcagaatacagccagaattgttgataaggttactatctctgctgttactgatgttatcgatgctaaattgcgttatccaaatacggccctattgtttattactttcaatgcgcgtcaatttaataatcgcatccctaaaattagcgttcgcccaaaaggtggcttgcttatcaaagtgcccacgaattatgacccgattaatcgggcctattcaggcgtatgggatggcacctttaaacttgcagcaaccaataacccggcatgggtattttatgatttagtactcaataatcgctacggctgtggtgaccggatccagtcttctcaggttgaaaagtgggacctgtataagattgcgcaatattgtgatgaattggtacccgatgggcatggtggtgatggtaaggagcctcgattcctgtgtgatgtttatattcaatcgcaagaatcggcataccaagtactgagagatatagcggctatttttcgtggtatgacattttgggctgataacaaggttaatgttgtcgctgatatgccagatagtatttttagaacgtttactaatgccaatattgttggaggtaagcctacctattcaggaggtagtcagcaaaatcgatatacacaagcattagtttcctacacagacaccaataaccacagtaatgatgcgattgaggctgtggccgatattaaactacagcgtcgttacggagtacgcaaaactgaaatatcagcgataggttgcactcgacagacggaggctaaccgtagaggtcgctgggcgttactcaccaatgctaacgacagagttattagttttgcgacaggattagagggggcaataccttctcctggtcatatcattgctgttgccgattctacattggctggaagagataatggtggacgtatatcgcgtgtagaaggcagaaaaataacacttgatcgcagagccaatattaaagcaggtgataggttgattgttaatctgccaaacgggcgctcagagggaagaaccgtatcactggttgctgataatatcattacaatttcaacggagtactcacaggaaccagagaaaaacgcagtttggacagttgatgctgatgatttaacattacaactttatcgggtcgttaatattactgataatggcgataatacatacactattactggcgcaatccataacccaagcaattacgatcacattgactctggcgcaagaataggtgagcgtccaatcaccattgttccaccgagtgtgcaagcaccacctaaaaacattcgtatatcatcctattctcaggttaatcaaggtatttcatttattactctgcgtgttgattgggatgcagttgataatgccattacctatgaggctcaatggcggagagataataataactgggtatcaatgccaagaacatcaacatgtgggtttgaagttgatggcatttatgctggtcgttatcaggtgagagttcgtgcgataaatgcgtctgaaatatccagtgtatggactaatgcgccagaaacaacactgacaggaaaagtagggagcccgcctaaacctgtaaactttagagcttcaccgctcgtatttggcattaagttaggctgggaatttggtgaaaacaccagtgatacgttaaaaacggaaattcagtacagcaaaaccaataatggtgaaggtctgatgctgttatctgatgttccttatccctcaaaaacctatgaaatggcagggttatcagcaggtttaacgttttattttagagcaagactggtagataaaataggtaatcattccgaatggactgagtttattctgggagaatctgagtttgatgctagtattattcttgatgaattagcggggcaaatcagccgagaccaactcgcacaagacttattgggtgaaattaacagtaaagctaaccaaatcgatattactgaattacatgagttgatgaggataaatcatgacaagattttatctgagttgatgaggcatggagcaacgattgaagaaagtgaaaaaaaatgggaggaggcaggaaaattactggctgagcggatgaaccaagtttcaacggcaacagaagcacaggctgccgcaattaaacaagagcaacaagcacgtattgagggtgataaaaccgaagcgcaacaacggcaatccttagctactcaacttcgtggtgattatactggcaatgatttatcgaaagtgaccgcaggactcatttccgccgagaaacaagcgcgggtctcgggtgaccaagcagaagcgaaagcccgacaatcactggaaacacggatgaatgggaatgtttcagcgattaataaatcattagaaaccctcacctcgaaacagcaagcacaaacgcaagagatttcaacgctcaattcaaatcttaaggggaaagctgatagcagtgtggtgaatgcgttaaatacgcgagtaactaatctcgatggcaaagtgatgtccgcaacctctcaggtacaaacgttatccagcaaattagatacagtgaaagccgatttaacggagtctgtggtggtggatttagatttatctaaactcaatgaaaacacctattatccgattattttgccattagtaacttctcgacgttatgcctttaaggtttttagaacattagggcaatatagagacaataaaccgagctatgcgactcacagcaccaaaggctttgccatgattgtggaatggcaagtgagtggttccggatggggaacccagtctgaaaaccgcatcattgataattttgattggcgatggacaaatcaatcccctgtgatggggccagctcaattaacgaatggttctgtggaatatatctatttgcgaggaggtgctaaatatcagctcactaagcataaaagtgttaaccatcaaattatcacccgcacttataccaataacaaacaatcggtggcaccaaaaggatttgtggcgaatgaagtacctaagtccagcgaacagaaagccaatgcaacggcgaatgcggtaaaccaacttgaaactaaggtgactgaggtctcaggtaaagtgacctctaccgcccagcaagtcactcgccttgaaagccaagtgggtacaagttcagccaaaattgaacaaacgtcgaaagtggtcaccgacataaatggcaaaatttccgcatcatggacaatgaaagttcagcaagatagcaaagggaataaagtcattacgggcattggcttagggtttaatgcacaaggaaatagccaatttctggtcaatgcccaaaactttgcggtgatatcgtcattaaacggcaaagtggtgacaccgtttatcgtgaagaatggacaggtagttgttaatgaagcttttattggtgatgcaactattaccagtgcaaaaatagctaatgtattgcaatcaaccaatttcagccatgcaaacaaggtgggctatcaacttaatatgcgcactggtgaagaaattaaatatgggaataacgctcaggggtactggattgaaacaaacatattaaaacgtttgtttgataaaaaaggcacaatgcgtatcagaatggggatatggtaatgggcatgggtttagaaatatatgatgagaaagggcgactcattattggagaagacactattataccgcgccacttggggcaatttgaccttcctttgtcccaatatggatctcttactattcctgagatttccttaggaggtgaggttgtttgccatttctggctacggtatcgctctcgatggagtggtgagtttcatgtagataagcctaatgagagaacagaatactccatatctggaaatacgttaaactaccgcgttgattacaatatctatcgctgggagaacaatggctctggtggcgggcagacacaagcgaatgactcattctcaagtcatgttgtcgtatgggtggtgtgaaatggttggtgtagaaatttacacaaataataggctgatacaattaaccgataaactcgaaacaatatgtgttttgagaaaagcaactcctgatgaactaacgtcatcatcaggccctcatgatagctatccgagaatctatgcgttaaatagccaatggatggttgctccgatttccaaggtaagcatacctcaacacggagttggtcttgaagtttatgatgagcaagggaaaatgaaattttcatctcttgctaagttggtctgctttgagaaatattatgatgtcaatacggggagcgctggcaaaggctcattaagaatcgcaggcaaaagtggtcatcggtatggcatgattaagactcgctctatggggtattttcataatacaaacatacgaagctacatagaccctgacacgtgggatgaagtttggacattcaaaagatatagcgagcgttatgtcttgattgatgatgtgggagggttaacatttgagtatcgatacgagttcttaggagaagaggatggctggataagtatgcctccgagtcgagaaggttctggattaatggaacaagggcttatgatagacgtttcaatgttagaagattaaataccgcactaatgtggtttttttgtatctaaattttaggaaataaatcatgatatacacaacaggcactgttagcacagtgtcagggtctgctattgtctctggcacaggtaccattattttaattaaaaatggtaatgctaattttatttatatggtggacagggttaatagcgatacagaattagtcatttcacaaccggctacatttaccgtaaaaaacactagttacagcattaatctcactgagccgaactcatacagcgacgctaataatcgtatgaccgctattgcatcagatattacgtagttcttaaacgagcaacgagttacgctcgatggtgttaaaaaagtgctgggggatattagtaaaaagttagataaaagtggtgtggacctttcagggatttcgaagtgcgattacacgtaatacacaaatggcttattgtgtgtttcgacaaaaatccaccttaaaggcgggcgctattggtctttgccgacaatattatcgcatttagataagtgtgttgtgttttatcataccaccaaccctcaagcggaagtgagctatttagcgcataaaaagcaattatacagttcagcccaaacagacatttatgtgtgtgtattcgtttcaggaatggttttgaccccgaagaaacgttgggggttatcactgtacagtgaagatggagcacgggtctttaatacggactatctgccttttacccgaggacaatcaatggcattgttattacggaaggggagtgtagagactccatatagcttgcctttagtctgtgcaaccagtcagtttgtgaatgcatcttatcaggatgaccacattgattgggccaagcgcaatacggggatacggggattcgttttcggggaaaacagatttttgtgagcgaacgaatacgtgatgctcatcggcaacatcatgtagagcaacgtattcccttttatgtccttaatggttcacattatttttaataaaatgaatacctgtctatatttatgtgggatacatgtcgcttttctttattggcataatgctttctgctgataatgattgttttgctttaatcatttctttttcatttgaaaatttataattaggcaatagttctttaggtttgacacctaaaataaacgcgatagagaataaatgttctactgttattttggtatgtccattctctatacgtgaatagtgctgttgacttatttccaatgaatgggctatttccctccctgtcatccctaattcttttcttttttgcattattctataagcaataatggaattaattgtactcatgaacttcattctccaacaataaacagatttttaagtttaacagagtaaaaagcatttgttataaaagcattttactctacttataaaactcaattaatttttattgatatgaaaaagtaatcgttgctactgcttttacacttcctggcgtaatagtattttctgtttttatataattagcttttaattttatacgtggatttatctctcctctataatttgaaaaatgccattgattttgatttcctttgttaggagtgtctgaaccataactaatcgcagttacttcattatttttatataatcttagcccaacgccttttgccgtagaatccgttgctaatgttaatatatcagaacgattcccatgttgggtcgcatcatttaatgtagcataaacatcaataccgtcttggcattgaagttgtatattaacttcccctccttgcacttctttatacaaagacgtgaactgggattgatagacagtatttaatggaacaacataattcttttgattcatcgagcatgtttggctttgcacttggatgcgccctccatttaacataacaggagctgttaatcttttattattcaaacttgcccgattagattccaataaaatatggcccagttgtttggttggtatcgttacatacccattaggtaatcgtcctgttgcgacaaaagcaacatataaacgagcaccaaaacttccagttgcaccattataagcatttggatttgtattggcggcaacaggatcaatatatatacttgagctgtttatgggaaccaatggcgttgcaggccaatagcccgccataccaataataatacctagccctggaactccagtatcaaatatatcgaaatcggaagattgagtgttatttccttggcgaaagttatatgtgattttgcctattttaggtaatgtaggagtaaattttccacgcattaatgctattaaactaccgccgttaaatatatattgattacttgttccggtgagttcccctatcactcgtgggtaagtatgggcatcagcaggaccaataacaacaacagggagggtagatgtgttgattgttattggagacggtacgtagtcatttgcaccagcaacagctagactagggaatagagttaaaagaaataatatgacaaagattcttttcatggtttgttcctaattagagtgcggtatacactgaacaggaatggtttgaggtcgcatgtcagtttcattgcgtgtcgcatgatatgtaaatgagcatttatcgtcatgatttggtccccatatcacatcaagttgaccttgtttaggaagaccgcgggtaaataagcgtccagcttgagccacatatccgactaactgcttatgctcatccaaaacctcggaagccattggaggagtactaccatctggcattcgaatatcaaatagtaggcttctccctgtttgagtattaaatgtcactaacgtggcactattagcgcgaggaatgatttcttgttctgttgctgataactcaacattcaaatccaaattagtggggtcgatgctaatttgatttttttcataaggcgtgacataaggcacaataccatttccccaaaaatctaatcggctacctggtgcattattaatgaccgcaccttgtgctccttttgcatggataatggtaaaagtatcacttaaatcattacttaacgtcactccataaggatgtacgacaacggcccccgacgcacccaatgacatttgacgattatgttgagtatcttgcccgacggttgcggttacatttacataaggtgaacgatagcctccattcatcgcatagccggaaggtccactttcctgactattacctgaaataccataagagaattgattatcttccccagcgataccgctgatggatgtttgaatgctgtttttctcgcctttattataatttaagacagtagaaaaaatggggctttgaacacgctctcccaaaggaagcgtaaagttcacataaaatctgtcatctcggtgttgttgctcattatctcgtgattgagaaaagccaatctgataaccaagttttttccaaaaatggctatatcccatctgatactcattacgacttcctttatgctcccagtaattataagtggtaccagttaaaaatatatttccccatttttcacctaattcttgattaattgaaacttggaattgatttttagggcgataaaatgcggcactttttatggaaacatcatcaataaattcactgtgattagccaatagcgcatctttcaaatggtaaaaatctttagatgaataacgataggctgctaacgtgatatttgtactcgtggtcggaatattgacgctatagctagtatgtaaactgtagcctttacgcgttacgttagagtgattaaatgttgttctggacaatgtaatgtcagatgcaattgccccaatcggcgtgttaaaagcaacaccagccaatcctgcggtatattttgagcttgtggtcagtccactatttaaagtgatatcatttgtcaaaccatattgatatgtgccttgtgcaattaaatcatgatatgtctcatttgcataacgatagcgtcccactgacatttgccaacggctaaatccgggacgaataagttgggcaacagaagcaaaaggaaccgtaaatgttcttgtttgtccattagattcggttatttgcacaagaaggtcgccagcatatccactgggatacaaatcattaatgacaaaggggccagcaggcacagttgtttcataaaggatgtgagcattttgataaatcgtaactttagcattactattagcaatgcctcgcacgatcggagcgtagccacgtaaagagttgggtaacattcgttcatccgatgctaatcgaattccccgtaagctaaggctatccattaactcgccattcgtataaaaatcacctaatgtgaattgtgcccgtaaccgagcaatatcatgcgtcacatttgtttcgatattctgatatccggtagaatgaccattattccagctttcaccaccacggtgacgaaaagcccatccccataaattgagtcccgcttttaacccaaggtaagtctgctcattatttatatccggagtattgtattgataatagttaacatcatagttgacaaatgcggcagggactccactttgccactgtgcaggggcaatatatcctcgaggtcgagtattcacttgtgcctgaggaatttctatattcagctttaaagtggataaatcaaaatgaaattttgctgaggggagtccttctgaggcgggataacaagtggctttataactgttttcaggaacagtgcctttgacgacatcaattaatgaaagtaattccggcgttagacataacgtcgacgtattcgcattgtcagtatataaatactgtacattagcttttcctttccattcattattgagatagatatcagcgtaatacttgccctcaggaatagggttgccataattaaagcgacgtatatcaatcgcattctttccttgcactgaatgcaaaaagctaggatcaaattcagcttcttcagcagcgaatgaagaaattgttatcaccccaatccccaaagcaacacaaaacggaagagaataacgataagaaatgaggtgtaaccgattattaaaattcattatattaccttattccaaagtagattcaccttgttggtatccaccataatcattaacaacaacccaagtgactttatttgttaatgttggcttctctttaagtgaaaatatttttgaagaaaaaggagctatcatcccactttgttcaacaggcgttagctgtttatcctgacccactgagattttgttgtaagtgatgtaataaggtgttgggttaatcgctttaatgcgtagtgctccttcctgatgccaagtcactttttggtaagcatcatcaggcgttacgttgagattatcagggcgaaagaaaaacttaatgcgactacgaacggctaattgtaagtaattgttatttccctctgagttttctgaattttcttccactttaggttttgctggaatgtctaagacatttagatagaaaagagactctctatcttgtggtaatgattcaccggtatagacaatccggatggtttgccctgatttcggctccatacgaaatatgggaggagtaatgataaaaggaacgtgaattgaatctggtgctgcagctgcgtttccggtatctaaccaagactgaattaatgcgggggattcatcgttattatttaattgaacattaatgcttttttgcgttgcgggataaacaacgcgggtccccataataaccacactggcttgagccactgtggatacaaacagagtcaagaaaataagaatgaactttaacataatacctctagaaggaaatggggcagttttttctgccccgtaaaataaaagcaatccaataaaccttactcataggcaatggtgtaatgaacggttgcttttacatccccagcggtagatgatccggttgcataatattgagcaaaatatggaaggtttacatcagcattgtcgatttgtacttcctgaacattttgtgagttaacatcagtacctaactgaattgttgttgctgcatctgagttaagtaattgaacttgaacattattcgctttagttcctgttgctgtattttttaaattatgtgtagttaaatcagtatcagcggatggttcaaaatatactttaacgtttttagcaccatctttatctgtggaacaaccagttaacttaattgtaaatggagttaagcctgctgttgttgctacattatttaatgttgcgactgaaacagtcggcaaaataacagctaaattttttgattgggtatcaacagaacatgtttgatcaacaactttacctgtaaatgtaattgttccgtcatacgccatagatgagccagcaaatgcagcagaaagaatagtagctagtgctataacttttcttttcatatatttatgattcctattttaaattaaagttaagttattttttgtttttcaaaaaaatgaaaagtattattgaataataaaatatatataatcctattaaatagagtttatagtgaggtttatatttgtagattatataaataataaagatattaagttttttaatggtgatgtagcaaatataaaaataaataattgaaattattatttcaaatatcacttaagtaaagatggttttttcgatcgatggcgttgattttgatagttacgacctattaatggttggtgaaatgatcgttaaaatcgatcttgttattgttgttcaatgtgttatatcaatgattgatgatatatatatgagaaggttattagtcaaaacttgagttttaatataaatcaaattgcttagctctttcagatatggtgcagaattcccatgtagcaacttcttatttttttcactataaaacactaaccctttattaaaatacattcataaatgtgctggttgttgtcgttcaacttcggacgcaacaattggcatgttgagccgttctttatatgcgacacctgaagcagccaaatcgacattgattttgtctttttcttcttgagataagtttgcgaggttcataacggatccggttagtttttggagagtatagcagggtgggagaatttaacagaaaacacactcactaaaacttgtaatatattgatttatttgtctggtattgtcatgttttgtcgtgttttttcttattaattatatcatggttaaattgtaaataattgattttaaaacaatagcttgatttaagtctgcttattggattatagtaggtcaatatgcgttttgctttgaggaaaaaatgaccatgaatgaggcagatgcccgcccaacgaactttattcgtcaaattattgacgaagatctggctaccgggaaacataatagtgtccatacccgtttccctcctgaacctaatggctatcttcatattggccatgcaaaatcaatttgcttaaattttggtattgcacaagattatcaaggtaaatgtaatttacgttttgatgatacgaatccagtaaaagaagatgttgaatatatcaactcgattcaaaaagacgttcagtggttaggtttccaatgggatggtaacgttcattactcctctgactattttgatcaactgtatcaatatgcgattgagctgattaacaaaggcttggcttatgttgatgagttgagtgctgaagaaattcgtgaatatcgtggcacactcaaagagccaggaaaaaatagcccttatcgctctcgtagtgtagaagaaaacttagcgctatttgaaaaaatgcgtgcgggtggctttgaagaggggaaagcgtgcctacgtgcgaaaattgacatggcatcaccatttattgtcatgcgtgatcctgttctttaccggatcaaattcgctgaacaccatcaaacaggtaacaaatggtgcatttatccaatgtatgattttacccattgtatttctgatgcattggaaaatatcacacattctttatgtactttggaattccaagataaccgtcgtttatatgattgggtgttggataatatcactattccttgccaccctcgtcaatatgagttctcacgtcttaatcttgaatataccgtcatgtctaagcgcaagctaaatcagcttgtgacagaaaatattgttgatggttgggatgatccgcgtatgccgacaatttctggcttacgtcgtcgtggttatacggctgagtcaatccgcgaattctgtcaacgtattggtgtgaccaaacaagataacaacgtggaaatggcatcattagaagcttgtattcgtgatgatttaaacgaaaacgcacctcgtgcaatggctgttatcgatccggtacgtttagtgattgaaaatatgccagaaggtgaagagattttaactgcgccaaatcacccaaataaaccagaaatgggaactcgtgaagtaccatttagccgtgaaatttatattgatcgtgcagactttaaagaagaagccaatcgtcaatataaacgtctggtattaggtaaagaagtccgtctgcgtaatgcttatgtcattaaagcagaacgagttgaaaaagatgaacaaggtgaaataaccaccatttattgtacttacgatccacagacgttaaataaagatccggctgatggtcgtaaagtaaaaggggtgatccactgggtcagcattccacatgctattccagcagaaattcgtctttatgatcgtttatttagcgtacctaatcctggtgctgaagaggatttcttatcaaccattaaccctgaatcattagtgatccgtcaaggttttgtggaagcaagcttaaaagatgcggctattgaaaaagcgtatcaatttgagcgtgaaggttacttctgtgctgataagctttcgacagcggataaactggtctttaaccgtactgttggtttacgtgatacttgggcgaagatttcgaaacaaggttaatacgctctgttttagtggcgtgtaatatcactaaactcacatcttaataaaatgctcgataataatttatcgagcattttttatttatcaaataagtttgtttttattgaccaataattattattttttatttttttaatgtgagtttctatagctattatttgtatcaattcttatttacgttgtgttaaattattaacttttgtcatcatcttcttcttttatttcatatgattatattgaatttgtctataataataaaaatgtgaaccatgacacatatttttcttttctaaaaaagtttattaattaatgcgactaataattcttttctataaaaacgaaacattatcatattaggtgtgataattttcttttttaatatcaatatattaaaaaatatttacgttctacttgtccctcattgactaaagaaaaaatatgaaactgtaattaagtaatgtgcccttggtcatattttgataaaaattcttttttttaggttgataattcgcgtcgcgaaaaataagctgttgttaacctaattttaggttttttccccatttggggttttatatttggaaataggcgttggtgcttatttcttttttagtcaaagtcaaagaggaaacaatgctatggttatgcaacatgctaaaccaggcagggtggcacttgccgttatgggcgcattgcttgtaactgcactacctgcgaaaatgtcttatgctgaaggatttattgatgactcaaccctgacaggggggatctattactggcaacgtgaccgtgatagaaaagagttaacaccaaacagtcctgattacggcaaatataaagcaaatttacaccactctacctttaacgctaatcttgatttttcttctggttatctgggtgatttttttggtattgatttagctgcttttggtgctgttgaacttaacaacagtgggccagctgcacctaatgaaataggatttagtgatgcaaaaagtcgctgggatgaaaaatggacaggtgatcgcagtggcgtgagtatttataaagctgctgctaaatttaaattaggccatttctgggctcaaggtggatatattcaacctaaagggcaaacattattacgtcctcattggagtttcttacctggtacttatcgcggtgcagaagcgggcgctgtatttgatttcgataaaaatggtgaactctctttctcatatatgtggactgatgaatataaagcgccgtggtatcggaatatgtacaatttccgtaaggcagacttagagacaaatatcagttatttacactcttttggtgccaaatatgattttaaaaatagcttagtattagaagccgcatttggccaagctgatggttatattgatcaatattttggcaaagtttcttacgatttccctatcgcaaataatacattaaaaacctcttatcaattctacggtgcaaaagataaagtcaccggagggggaattaacgatgtttatgatggtttggcatggttacaagcattcactttaggctatacctacaatgtatttgattttaaagttgaaggtacttgggttaaagcagaaggtaaccaaggttactttttacaacgtatgacgccgggatgggcaacctcgaatggtcgtttagatatctggtgggatggtcgttctgattttaacgccaatggtgaaaaagcattatacgcgggagtgatgtatgatctaaaaaattgggatctaccgggctgggcgattggtacttcctatgtgtatgcttgggatgcaaaaccgagtagtaaccctatttatgaccaaagtaaacgtattagagaaagcgcatggaatgccgacatcatgtataccgttcaagaggggagagcgaaaggtacgttatttaaactccactacactcgttatgataaccattccgatataccaagctatgaaggtggttttggtaatatcttccaagatgaaaaagacgttaaattcaatgtgatcatgccatttacgattttctaaataacaataaggataaagtgtatttattacgctttatccttaataaaaaatctaattaacattatgataaaaaagaaaaaacaataaaaaatatgataaataaaaaagagtaatgtattcatgttttttaatatccttttttttagtctttttcattcttgtgcattttttcattttatggcagatttcttgcaacttattttacctttctttatttatatttattaatctgcatttaatacaattgaataatacaggttttcaggaagaagcatgttaaaacgattggatgatttcttattagagccaccattaaagcctttcagaggtataaatcgatttattgttgagtttctttttttcggtgtaaaagaggcacgttcttgcttattcgctggttttttcttctttattttatttgcgacgcctagtaaaggagtgctaggtataccgcgttatgatgttttgcttattctcgctattgttttccaattatggatggtatggggaaaacttgaaacatgggatgaattaaaagcaatttgtttttttcatgttgtaggttttgtcatggagctatttaaaacatcagcagcgattggctcatggaaatatcctgattttgcttacacaaaattgtgggaagtgcctttatttacagggtttatgtattctgctgtcgggagttatttaattcaagcatggcgttttttaaaagttcgaatagaacattatcctccttattggatggcaactttggttgctctcgctatttatattaatttcttttctcatcattttattggtgattatcgttggtatttaacggcatttattttaggtctttatgcccgtagtgtggtctattttacgccttatgatacagagagacggatgcctctgttactggcttttgttctgataggtttttttatttggcttgctgagaatttcggtacgttctttggtgtatggcaatatccaaatcaaattggtgcgtggtctgttgtgcatgctgggaagtggggatcttggtcactattggtcattgttacatttactatcgtagtacacctaaaacatattaagcatagtattagtgtggttaagtagcgttaccaataaaaaaggaactgcgggcagttcctttttttactgagatattatccagaatgattacttctcatcatgtgcgtggctatcttctttacaattacctgcggcgcagtgaccatataaatacaggctatgattggaaagtttgatgccatggcgttcagcgatatttctttgacgaacttcgatagcatcgtcagtaaactcgataactttaccacaatcaaggcaaattaagtgatcatggtgatgttgttgagttaattcaaatactgatttaccaccttcaaaattatgtcgggtaacaataccagcatcatcaaattggtttaagacgcgatagactgttgccagaccaatctcttcgccgatatcgatcagttttttatagagatcttcagcactgacatgatggcactcaggatcctggagcacttccaagatctttaagcgaggaagtgtaacttttaacccagcattttttaacgctttattattgtcggtcatgcggatttaatcctgttgctaatggtgaatttaatatgtgctcacaaaatactgtatatattcattaatacatagggtatttaataaccttaatgattataggcatgatattaaaaaataaacaccccacctatcacactatcttagcacaccattgaataattatcattctcaatattaagaatttatattatcccagaatttcgtcaaggctcatctcttctttgatctgagcaacccaagcgtcaacacgctcttcagttaattctggttggcgatcttcatcaatcgcaaggccgataaagtgattatcatcagcaagacctttagatgcttcaaaatgataaccttcagtaggccaatgacccacaatgactgcgccacgaggttcaatgatatcacgaatagttcccattgcgtcacagaagtattctgcatagtcttcttggtcaccacaaccaaatagagcaacaagtttaccgttgaaatcaatatcttctaatgttgggaaaaagtcatcccaatcgcattgtgcttcaccataataccaggtaggaatacctagtaatagaatatcaaatgcttcgatgtcttcttgactggattttgcgatatcatgaacttcggcattatccgcgcctaatctttcttgaagcattttggcaatattttcagtgttgccggtatcactgccgaagaatattcctatgattgccataaagtgagataacctcttttattctctttgtctgtatttttgaacaattaccagtaaaagataaacatcatgttttcatcattgaaaactaaagcactattttgacgaaaagagcagggtaattctgtcgaatttgtgtgattttcctgctgatttttttagctttgatgtttttttaacgcataagtttgtgcgagttgttctagtaatatttcttcaataagctcactacgactgacattttttgcgctcgcaagctcattaagcgcattgacagcatcctcatttaatttcaactcaacccgacgtaatccattgacgcgatcgcgtcgtaattggtttcgtttattaattctaagctgttcatcccgagaaagcgggtttgttttaggtcgcccaggtctgcgttcatttgcgaacaaatccagtgtggtgcgatcagtttgttcttttgccataaattttgctgtgaaagggcgtataccaatgactcaatatgaagcgcccaataataccccacatatcggcgtatcgctactgcttcctgtgtttaacctattgtcatttggtctttttatcaacaatgacagatttaagagcaataattgtacgctataaaatagtattgctggtgatttataaccaacaaaggaacattatactgttttggctaagaagcgacgaatggccttaattactgtttctggtttttcagaatgcacccaatgtcctgtattggcgacaacaaaggcggttgcttgtggaaattggcgagcaatattattgcgatattcatctaaaatatatggggatagtccaccacgtataaacaaaacaggatgatgccaagcaggcacttcttgccaaccaataatatcggggtaagcctgtttgattgcgggtaaattaaataaccattcaccttttttaaatgatttaagcagaaattggataacgccgtcttcttcaataaaagggcgcataatagcaatagcttctgtacgttgtgtgacgtgagctttagtgacagcttcaagggctgcaaaaattttatcatgacgacgaacattataagcaacaggagacatatcaataaccacgatacgttcaaggcgaagaggtgcgagagcggtcattgccattgcaattttccctcccattgagtgacctataacgattgcttttgcgatatttaagctatcaagcagggttaatacatcttgtgccatatcgtgatagtgcatactttcactatgaggagaatgcccatggttgcgcacatcaatttgtatcacggtgtggtcttgacgtagatcgcgacctagtacgcctagattattgagatcaccaaaaagcccatggatcaacacaataggtaaattgtttatcgttgctgtttctggttgatgtatttgatagtttaataatgcattgagtttcatattgatgaccaaaattaagtctattttttccttatgatgacatgtgcaatcatattagccaacttgttgtctttttcggaatatgaaataaagttaagctaacaagagatagtttaatttattatgttctgagaaaatagaataatatagattattattccaaacttaacgggaaagataaaattttgatatagctcaataaggataagtcagagttttatattattttaattgctgatgtgaaagggcattgaagaagatgtcaactctattctatggcaataaattcaaagaatagaagatgatacagatagaaacaataggataaatacccagcttaaagtttaaaaagattaattctttaatgaatacgctttaagttattgaaattttacctattttgtttttaaagattatatcttataatcctagtcacttttttttgaaaatagtactgggtagcaatgaaaaagatagaaattgatgacgaactttaccgctatatcgctagcgaaactagacatatcggtgaaagcgcttcagatattttaaggcgtctattgaagcttgatgccaaacagcccgtacagccagtcgttgtcactgagtcagtacaagcgcctgtcgttaaacaggatgctgatcttaagcctgtcgcaccagcaaaaaatccggtccgtgaaatgcgtgaactgctgttatctgatagttatgcagagaaaacaaaatcagttgatcgttttttacagatcctgtctacattatatagcttagatagtgctacttttactcaatctgctgaaacagtacatggacgcacgcgaatttattttgccggtgatgaaaaaacattgctcgacagtggacgtcatacaaaacctcgccatattcccggtacgccattttgggttattaccaactcaaatactgagcgtaaaagaactatggtacaaagcatcatgcaggatatgcaattccctgccaatgagattgataaagtgtgtggaactatctaaacactattgttaattgatgcattgcaaaggctttcgtttaaagcatgattgtgatgtaaaataggagaagatttgtggcaatccattcaagagctgggcaacatactcgtcaaagcgatctgattaatgtagcgcaattaaccgcacaatattattcactaaaaccgcaagcaaatcagaatgctcatcgtgtgaaatttggtacatcgggtcaccgaggcagtgccaaacgtcatagctttaatgaagcacatattctagcaattgctcaagctattgctgaagtccgagctaataatggtgtaacggggccttgctatgtaggtaaagatacccatgcattatctgagcctgcttttatttcggttttagaagtgcttgctgcaaataaagttaacgtgattattcaagagaataatggttataccccaacgcctagcgtttccttctctattttaacttacaatcaagggcaccaagacattgctgatggtatcgtcattacaccatcacataatcctcctgaagatggggggataaaatacaatccatcaaatggtgggcctgctgatactgatttaacctctgtgattgaaaaacgcgccaatgaattattgaaaaataatttatcgggggttaaacgtctttcttatgatgatgcattagcgagtggttatattcacgagcaagatttaattatgccttatgttaaagcgttaggtgacgttgttgatatgaaggcaattaaaaaagcgggtttgaaattaggtgtcgatccactgggtggttcaggaattgaatactggaaacgcataggtgaatattacgaacttgatcttgagttggtaaacgatcaggtggatcaaactttccgctttatgacattagatcatgatggtgtgatccgtatggattgctcatcaccttgggcaatggaaggtttattgcaactgcgtgataaatttgacttagctttcgccaatgaccctgattacgatcgccatggtattgtcacaccttcgggcttgatgaatcctaaccactatttagcggcagcgattaattatctttttcgccatcgtcctcagtggtcaaatgaggtaaaagtgggtaaaacactcgtctctagcgcgatgattgaccgagtcgtggctgatttaggtcgtgaacttgttgaagtacctgtcggctttaaatggtttgtgcaaggtctattcagtggcgagtttgggtttggtggtgaagagagtgcgggggcatcattcttacgttttaatggtaaaccgtggtcaacagataaagatggtattatcttatgtttactggctgctgaaataaaagcagtaacaggtaaagatccacaacaacattataacgagttagcgcaacgttttggctctccaagctataatcgtatacaagcatctgcaactcatgagcaaaaagcgttattgtcacgattatcaccagaaatggtcaccgcaaataccttagcaggtgatcctattactgcgcgtttaactcacgcatctggaaatggtgctgctattggtggtttaaaagtgatgaccgattatggttggtttgctgctcgtccttctgggacagaagaagcgtacaaaatttattgtgaaagcttccgtggctctgagcatcgcgaattaattgaaaaagaagccattgaaattgttaataatgtttttgccagtaaacaataaactaaataacttagtcgtataatttatttattaccaaatagaatacactctacctataggtggagtgtatttttttaatcataataacttttagatcacaacattgatatccatcattgatgattgatttagaattgaataaagagcggataatcaatgcaaaataattatgtgttacgcagtgtgcgttatatgttagatcttagcgatggtcatattgttgatataatgaaactggcggatttcacagcgactaaagagcaagtcaatcagtggttaaaaaaagacgatgatcctgcctttgttgagtgtgatgatatggccttgggacattttttaaatgggcttatcttttatcgtcgtggtaaagatgaaaaatatcctactccagaagtcgaaaaacggataaccaacaatattattttaaagaaattacgtgttgcctttgaattaaaagacatggatatgattaacatttatgaactagcggattttcgcgtttctaagcctgaacttagcgcgatatttcgtaagccaggacataaaaactaccgtaactgtggcgatcaactggtgagatactttctgaaagggttaactgaaaccttacgtggcaaaggcaaagcggtgaagaaataaaattagagtattttatgctataaaattatctagttactgaatgataccccaaaattgattttctgatttggggtatttttttatggtattaactggcaaatgaataaatttattgctaatgtagtattactaagtaatacaatgtaggaaggggttatggcacgagtaacgagtgtaactttaggtgaacacttcaatgattttgtgggctcaatgattaattcagggcgttatggaaatacctctgaggttattagagatgctttgcgtatgatggaaatcagagaagaacgactccaattggttcgtaaaatggtactagatggtgtgaattcactagaaagtaaaaatgacatggatgatatttttgcaagagctgaaaaggacttaaatgtataaactttctaaattagcagaagaagatatttaccaaattgctcgttatactattcaacaatttggagtaactcaggcaaaaaaatatcataatgatttaaaacagacatttgagctactagctaaagcaccttggattggacgagaatgtaattgggtgtgtaatggtatgagacgatttgagtttaaaaaacattcaatttattatctaccaaaaaatgataccttatttattactcgtcttattcatcattcaatagatgttgattttgttgattttcctaaataaatatttcattacttattaccaaatatattgtccagtcatatatcctttagtgctgatatagcattattggataccttatctcccttttcttgttttgattttctcttttttatcattcactcgcgaaattatttactataaccgtaattcaataaagtattagtttgctttgttaacggattttcgcgtttctaagcctgagcttagcgcgatatttcgtaagctaggacataaaaactaccgtaactgtggcgatcaactggtgagatactttttgaaagggttaactgaaaccttacgtggcaaaggcgaagtggtgaagaaataaatatgtcttaattcaaattattccctcttaatataaatagaagaattttttcaagaaaattctttatagtatgcgaactcgtatttaatcttgaatttaggtggtgtacattgtacacttttaaatgatggattagaaagggaacttaatgagtcatgctatagaatttattgaaacctcaatatttactcagcaaatcaaactattggctacagataaagaaataagaatacttcaaaatgaacttatcagtaaacctgataaaggcgacttaattaaaggaacaggtggattacgcaaaataagaatggctgtaggtaacaaaggtaaaagtggggggactagagttatttattttttagcgactaaggaagttatctatttagttatggcgtatccaaaagcaataaaaattagtttaactgattcagaaaagattgagttaaaaaaactaacaaaaaaacttaaaggtgaacggtgatatgagtttcttcaatgatctaaaagcctctttagaagaagccgtagaaattaaaaatggcgataaaaaagcatcgaaagtgactcggtttgaagttgctgatgtaaaagcgattagggagcaacttaacgtttcacaaagtgaatttgcacatgcattagggacaagtatcgatactgtaaaaagttgggaattaaaaagacgtaatccgacagggcttacagcgaaagtacttattgctattcataaaaaccctaatttatttaaagagttagccaatatctaatttcttgtttactgctaaacttattttgtttagcagtaaatctcactctctgattttctcttttttatcattcactcgcactcgcgaaattatttactataaccgtaattcaataaagtattagtttgctttgttaatgtttttttgtttttgtttttgtttttgtttttgtttttgtttcaattttgtttcatttttatttctattgtgaaatttaattacactacaagcaaaataaaggtgatttttcgcacaaaataagtggtctgatcagtagtaaaatttcatcaaatgaggtaaaatttcagcatcaattcattttatgcaggagaacactatgccagcttataacgaatacactaaaaaacatgttttagcccgtcgtactggtgcggtagcgctaggtattgtggcatttcctgttatggtttttcatcctaaacgcgctcagttttatagctatttacatcgtgtatggtctaaaacaagcaataagccagtttggttggctaaatcagaaatggcattaactagccataaataacagaaaattccatttaacgcctgttgaaacaggcgttattttttccccttcttcaaaccctttttaacgtgttatcacgtgtatttttcactgttctatttattctcttattttaagttacaataaaggttattcactttgagaagtgctaattaatctattgttatttattacatatgtacactacgcactgtggcgccgtgataacaaggagaaacaggatatgaaaaatactgatctagaattaattattaatgaaaagctaagtattgagaattttcacgactacgcacctaatggtcttcaagtagaagggcgccctcatattcaaaaaatagtgacaggagtaacggcttgccaagctttacttgatgaagcggtacgtttaaatgcagatgctgtattagttcaccatggttatttttggaagaatgagccagttgttatccgttcaatgaaacgcaatcgcttaaaaaccctactatgtaatgatctcaatctatatggttatcacttacctttagatgcccatcctattttaggtaacaacgctcaattagcgttaaaaatgggcgtaaaagttgagggtgagatcgagcctttagtgccgaaagggatttttgatctacctgtcacagccaatgaattaaaaacacgactcgaaaaagccttacagcgtaatgtgcttcactgtggtgacaatgcaccagatgttattcgccatattgcttggtgtactggtggaggacaaggatttattcaacaggcggcagagcaaggtgttgatgcatttgtaacaggagaagtctcagagcagacgattcatatagcaagagaaatgggcgtgcattttttcgctgctgggcatcatgctaccgagcgttatggtattaaagcattaggtgaatggttagcacaaactcaccatttagatgttacttttgtcgatatcgataatcctgcctaaacccagttattgctattctataagctatctctcttattaactaagtgagatagctttttatttaacaacaaccttgaaatttattcattaagttgaatgggtaacgggctttgtaattgttgcagattatcacatagccaaattaactgtaataaagcttgagagtcacgagcagttaaagcgagataacgagttaattggttagctattaatgtcatacctaaatcgtcagcaatttgtttgcttctctctaattgctctttttgcattgcagaaagttgttctcgccctgtacatgcttgggcttccaatacggataaaatggggcgacaaaatttttgtgcaagggtaggttcgctgtgatgcattgccgtttgtcgcttacgtttagccatatattcttgaatatgactaataaaaccagactgttttttcttacgtggaaattggtcaaaatcgagataaaacatttcaatgccttgctctgttttgatccaaatggtggtgggtaataaatcgatattgaaatcacgtcgaacaggttgcacggtgatcgcaacgatttctaattctcgtttagtgagaaaacgtaattcttctaaattattttgcgtttcgccttcccaataaaggcgcaaaaaggccgaatttccattattatctaccacttcccaaataacacactgctctacttcatgccaaattaagggattatagcttttgatatgtaaaaccagaggggaaagaaatccttctggttgatccgtaaaataattgggtaaatcttgccagttatgaatacctaattctgtttgtagttgatgataatctgtgacatcaagaaaatcggtttgattttgcgcaaagctatcgccaatagtagctagtttcccttcatcagaaatacgaggcgcttgtaataagaaaggtcggcgcatgagcttatctgcagtttgtttccataacgataaactatgccaaacactatagcgattaaatagggtatcaagttgattagggcgagcttgtgtcgcttgtaaaaattgttttgtttctttatcccagaaagtaaaagttgtgcctaatgcgccactttgtgctgtccaccaatgtgcatcaataggaataagcgcgagactggtttttttatcatcatattgacggcgaagttgccctcgtaatgtttttaattgttcaggtgtcgcataagatagctggaaaagataggctgagatatgagctaatagacgtaagacattgctttcatccatagtgaaatgtctttcagctaaccgcttgacttgagtacttaatgttcgtaaataagaggctaaacgaggtaaaccctcggcacgagcagacatattaagtaaatgtaattgcgttgcgctacttaaactaatgtgtgatagcccttgacgtaatagatcatcaataaattgttcaatagtattaataagggcaatttcttcatcattcagtgggcgttgtgaagattttaagggaattaaatcttcaggccacgtccaaggctgtgtattttgcttaaatattttcgcgacaatcgcaagatgaaaagcttttttctgagagctagaaaaaggggataacatgccatcgtaaccacttgcttgtaagaaaatgaccggttcatcaacatcagggagttggatttttagctgggttcctgtgtcttctagaactaaagttttatcttcccattgttcaattaagttaatcgcagtccgacaggcgggtttacctgcttttttgatgagtaactcgggatcaagcgtaaataaagagggtaataaaggcggtgtttcaacaggcgctataattttttctgctgatgtttcaatgggattatcagtattaatatcatcagtcgaattgttgttggcttgtaaccataaaatagcggctaaaatatgtttgcaacaacctgctgcggaacaatcacaactggcttgctgaatgcctgcttcatgtaaaacgactttttgcccatcactgctaaattgccctgtatttgcatcagtaacagagactttttcgttatcaacatcttttcttgcgcgtcttaataatccggcattagcaaagacggtaagcgcatcttcatcataatgaaaataaacggtctgccaactcattgcattacctctgctagccactgtgcgaaatgttctggggttaaagctgcaacttgcatacctctatcggcgagtttttgtgcgatagttgagtcataaaccggttgagcctcatcatctagtgctgccagtcctaataatttaacttgttggctattgagacgttgtgtgcaatctaataatcgggttaatgatcccccttcttcaaagtcactgataagcgaaataacagtacgcttagggttgttaactaagctttcgcaatattgcatggcactagcaatatccgtacctcctcccaattggactgtcattaacacttcaacgggatcgtcggctaagtgtgataaatcgacaacttgagtatcaaacacgattaaggagacattaacagcaggtaatgaagctaaaatactcgcacacacagctgcatacataatggaactagacattgatgcactttggtcaacacagagaatgacatcccatggaaaatgctgttgcattcgtgaattaaagtaaggagtttcaatcaataaacgacgattttgggtatcgtaatgttttaaattggcggcaatagtggcacgccaatcaaagttacgactatttggtactaacgagcgtctaaagcgattacgacgaccggttaatgattggcgaaagttattacgaatttgacgcaaaatatcttcaaccactttacgaataatggtttttactgcatctcgcgtttcttcgctcattcgtccgcgtaagcttaatagtgttttagctaacgctttagtcggctccatggcttttagcgtattgggatctttaagaaagctactgatttgataacgttcaatcgcttgtgattgcatacgttcaaatgtgctattgggaaaaagtttgcgagcttgatttagccagtttacggcagtaagttgcgatgcatcgagagagccatggcgaccgcgctcttgacgtaatcctcggcgctgatattcacggcgataaagaaaatcgagtgtacgttcaattttaagatcatcagcattaaacgtggcttgccctaaagcatcatcagcgtattggcctaaaatcaagcgccagcgtttggcttgttgtattttatctttaggcatatcatcatcatgcttctccatgagtatggtctcctttctctgttttcttcgcctcaaaccaagaaatcatgccttgtgtcttaatgcgctgttgcaatttttgattgagtttagtggcttcaagcatttgcttggcactaaattctgattgccatagtgataaggcttgcgtatctaaaccaatatcattagcaatatattgtgcaagctctgcattttgtttgggattaagttggctaaaggcaaaacgcagatcaggtaaaatctgaataaagcgttcttcatcccattgctgtaataagctatttaagtgattgactaacaacggcaggcgaatgactagctctggtgcagtgcgcattataccgacaaaataaccaatggcatgttcgggagcgctgcctgtactaaaggtcgcatttagcacggccgctaaggtcttttcgtcaatatacgaacctagataacgtaatgcatctaccgcaccttttaataaaggaacggtatctaattgtccatcaaggcgattaagttgctgataaaaatcacttttataatcatattgatgatccagtgatggcataaactcaatgagttcacgtaaagagagtagggcttgcagattgctttcttgttgttgctcatcaccttgagccaattgctctaagcaaaagaaggcttgagggatcacttgatgtagcctattttccaatgtcagctcatcggtaatatcaagatattgacgacctcgccataaatggatcaatttatgtccacattgtgttaatgactcaaggcgaaaatcttgctgaatatagctatctagcagtttaaatagcgtagggatacgctggtggagcccaattaatgccgcttgaattaacaaagtgaccgcactttggcttgaacggctttgtccttgttctgcaagctgtttttccattgctaacagtttatttaaggcgatagtttcaagttgagagcctttttctgataatgagatcagttcaccttcaacattgggggtccatgcatattgccattcttcaaataatagatctaactggtgaccagaaagaaaatcaggtccattgacacggtgggcaaaatggatttctaaaaatgccaataaatgtaaaaaacgacttcttaagcgatgttgggggttgcgataaacatcacattttgtagtttttgctaatgtatcatcaagtttaaagcgaaatgctttggcgcgttcataggtttcattgactaaagggggcgttgctgtacctaatggaatttgtcctaatagataacctgaaaaacaggttttgatttcgtcccataattcgttttgactgtcatctaaactgcctttaataaaggcgctttgtaacccatcaagcaaatcataacgccccataccagtgtgctctcttagtaaagcgaggcgtaaactctgctcggctgctagttttacggttaaataactgggtggattatcaaattgttgttctctgatagtctgagccactgagcttaaaaaggcgatgcccattttattgcgataaacttgcgttggctgttttgccgcctcattgttttctaatttatcatgatgttgttgcattaagctttgccaagcttgttggtaaaaagccggagatggcataccagatgcatagccattaagtgcatctaatctgtcaaagctatagcgaataagccaagcttgctctttttcgcccattttttgcattttagtaaagtgcttttgttctgagctagaaatagcgaaagagttgggttgtgaagaagctaagccttcgattagcgcaagggtgtgggctccccctgtgacgattaatattttggcattaggctcgtactgtttgatggtttttatatgagtgagcatatgtgcttcacgttgtgaagagccttcagatgcaagtacttcaggttcatagtcaaggcgtgcaagtgcacaccaaataaaaatgtcattaaacagagtttgccaatctgctaatgcctcaatactgcgtaactcaaaaagatgctcccaaacatcatcatgatcacggcaatgacattgtttagctaattgtgcaataaattggctatgggctaaataacgttctttttgtaagctacggctttgtagatcgctgtactcttcgttattgacttgagcagcccaaggtaaatcgataaaacgtgttgttgcattgatgcgtaaaccacctcgcaaagcttgccactcaggggaatattcacaaaatgggaaataggcagagtgtagcgatttttcacgctcttctaggccactatcatgatgacaatattcggcttgccccataatagcaataggagggagagtatctttatccgttaggctaggaataagcgaattaaaggtatccggaccttcaattaagatataatcaggttttacagaatcaattaatgataaaactgcataagcacaagctgggctatggtggcgtacaggggcaaaatagagatgttgttgctgtaacgacgtccatttcagtcgggcttggtcaattcttgttggtaaagatattgaaggtagcgtcaccgtgttgatcccttttttgggtgaaaaagcagagtaagttaactctgcctttaatagataaataaatagactttaatgcctcgctgtggctctttacgttttattgccaaaagtcttttgatgcatcaaagaacgctttccactctttactatttctggccctttctctggcgacgttgtccatgtaataacgaatacgcttaatatcatcaggattatcttttaatacaacgccgattaattgacgtgcaatcgcaccggcattcatcacgccatcacctaaataatgcgcttctaacgcacaagcataagcgatatttacggcttctgctgttgacataaccgcatcaggtgttttgatattgccaccatcttgggtattacctgaacgtaattcttggaatgtggtaaccagtaattccaccacatccatagggatggtgatttctgtcgctaaagcacctaactcattttcaagctgtgattggatcaaactgatttcaaaagctggatcacgaataggttttactgtttcaaaattaaaacgtcgctttaatgcggcagacatctcatgtacacctcggtcacgcaagtttgcggtaccaatcaagttaaatccgggttttgcactaatacgcgcaccgtcgcccatttcagggatcattaactgtttttcggacattaaagaaaccagcacatcttgaatttcaggaggacagcgagttatctcttcaaaacgaacaattttaccttgtaacatgccttgataaatcggtgagccgactaatgctcgttctgttgggccttctgctaatagtaacgcatagttccatgagtatttgatatgatcttctgtcgtccctgcagtaccttggatggttaatcctgaatcaccactgatagcagccgcaaaaagttctgagagcattgattttgctgtacctggctcaccaaccagcattaagccctgtttgcctaataatgtaacaattgcacgatcaactaaggcatcatcaccgaaaaacttaggtgtgatacctaaagtatcatcacctaaaataaattggcgcacagcccgaggagagcgaagccatccttggggcttcggattattagcatccgcttttgttaagcgttctaattcttcagcaaatcgaacctcggcactttccctaattgcttgttgttctttgggtgtttttttagccatattctttcctaattatccctaaattttaccaaggtgttttcttttcccattcaggatcaaatcctgcacaagcttcagcgacttttagataatccgcgtagctttctgctaataaaatcggtggtacttgctttaactcaatattattgcgatcccagtaattttgctgatccttctcaaaacttaaatcgaataaaaccgctggaatattttcttctggtacatagctaccactaaaaccgatattgacgtagtagtttaagctagagaagaatttgtaatagtgagagaacgagcctccatcttcagcagggcctcgctgatagcccattttggttaaaataccccgtaaggtgaacgtgtctgtgatccaaccttttcggtcttcaacttctgtttgtgtcagatctaaatcagggatcttatgttccatttgtgaaaataagaatttcactttgtaatctttgaagtgtgcaatccatgctttacgctcatcttcattaactagggcggcgtgagctaattgaatcaaagaatcattttgtaaggtgacttcgtcatcttcaaggttaagtaaagcaccatcatcagaagggcggaaggtattgataacttcaccttcttttacttcttgccaaactaattgttcaatcaatttatgcataatagggtgagctaaaatatactcttgccaatcagcgcttagccattggcgttgcgcgcacatcgcttcatataaacgcacactttgtaattcaataacttgtttaagttcttttttacttgaagtgaaaagttttttcgcttctttaatcagctctggatcgtcatttttgcgtgctgcaggtaatgacttaacttccttaccttcaggattaaacagaacaattttttgttttgcatccattttggcggtgaaagtacgctcaccatattccagtactaatgttcctgaatcatcaaagccggcggttggaatggttctatcggctaattcatcagcactccaaccattgcgttcagctatttgcgtaactaaattacgcgctttttcctgcacagatgctgtgcgataacgacgtgataatgaaagcagaagttgaatgataataggatcattacttgaagctaccgcatcaatcatcgcttcgatttgcgcacgacgctgatagtgatcacgcatatagttacgtaatactgatactgcaatatgcccctcaattccacaaataagcgcgagcattcctttatcgctgattgccgaacctaaataacgacgtagtacctcgtttttaatttcttcgacgacttgctctaaagtataggtttcatatttagcataatattcaggataacgtttggcccaatctttgtattgtgttaatcgagaaggggcattttgttgcgcttcagccatcgcttcttcaagtgttggtcctttaatatcttgagcgacaaaagtgtgcaggataaagcttgaaagtttatgttggctatcaacgcaaagtaggctgatataacgttgtaataacgcattaccccctggcatttttaatttgacggcgagaataatccaccaacgaataatcgcgggatcaaccgcttttttgttttcccatgttaatgcagggatcgcctcgaagttaaaccaagcaaggcttgcgggtggtttggctttgagacctttttcagcttctgctaataatgtctttggcgataaatagcttgaaatatcctcacctaattgttctaacgcagtgagcagagcggctcgtactacttcgcgtttctcttttttcagtaaggcattaagggcaggtaatgagtcagggttatttaaacgtgctaaccattcaatcgcggtgactcgaatttcttgtttacttgaagttaagccttcttgtgcacttaagtgaatattcggtaaggtttctaataatttctgagctgaaactcggtgtgttttattttcacctagagccaattccatgatacgcggaacgaattgtgcaggaatggttggaaaacggcttaatacttcaataccttgtgaagtttcaaattggcgatagcggtgttcactttgatttggcattaagtttagcgcttctgcaatataatcagtatgttgagagaagaaaggccaaacttgttctggtttacggaaacgacgtaagccatcttgataagattctaagcacagcgccgctgtgatacgcgttgcacgtttgaaatgacatcgttctaatacattttcaacgtgtcgtaattcaatatcactcaataaacgttcaggaatatcactattaaaatagtgagaggaaaagtgatccgcatgttggcggttattggtgatcacgcgcacggcatggaaaaaggtgtattcaggtaaattaggaatacggtttttgtgtttaattatttggatctcattgacttgaatagtgccttgtccgctattgagtttatccactaatgctcgacactgtttttcatcaattttagagagatctttataatggcgttgtgcccaattataagagtgtttagacgttttattttcttcaatttcacgttcagcattttcttttgcttttactaacatttcattgaagttattcaccagaatatcgcgggcactatcgggtaatggtgtgtcttctaagggagtaaaatcaggcgctttaatggcttcaacggtatttgcattatcagcaacacaaaaacgttgtagcgcactttcaatgctcttgataactgcttttgaggtttcatgttttaatgcttctgccagcacatcacggttttcaccttggcgcgcgaataaatcagcggcttgtgtacgttgtttgggagtaccattcattaaaacatgggttaaattttcttttacgatttcagcaggtaaggtatttaaaataggttcagccgtttttttgacggttcttaaactgctagtggcaagtaaaacaataatatctgcaaaagtatcgcgtaatatcgtatttttatttagataatttattagctcgactaagccattcgctgaaagtttttcaactaattcttttctaacaaattcttgatgtgaaagtagatagtcttttaaatcacacagttcataaatacgcttaagattagcggcataatattcagagacatcttttctatcaaaaattgcaaataacgcgttttcaccgccaatattggcctctgcttcgaccatattggcgataaactccatactccaatgtttacgatgttctaaattaaggttacgtgcattatcgtaagtggtataaaacgcatcaactaacaggtagataacccaagtggggacttgcgttgttgttactttaatattgatatcttgacatgcggcagcgatgactttggcaaaacgggccacttgctctaaggaaaaactttcaccaacctttgagtagagtttatggcgggcattaaggccttgggtgataaccttaccgtactttcctgtatcaacattactggcataccaccactctaatgttcccgcacgatgaaaataaacggcggctttcgctgcatctagtttatttaattcaaatagaatttcagggtttgtacctgtaagtacataatctaatgcacgcttaggtaaacttttatcaaatatagccagtaggacaagagagccttgaagatattgttcagtaatatcgacgtcttttttcccaaaaatagggagaatatctaatattttttttatcacgccagttccttaagccatgtatggataaacagttttttttaccatgaaacagtaaaacgaacaattttattattactggcgaaaataaagtcaaggcataacatttgttaaatatatggatataaacactgaaaaagccaatctaactttattaatattcaattcatcattatataaaatgcaatctcaggaaaaagtactaaaagttaagaagtgataataaaggcgttttttgtggattttaaaaagattaagaattgtctgtttaatttgctaagtattaacacttagtcctgtagataagttaatctttctattcttgattttttcgaaatgttacaaaataaaaagagcttcttataaatataacaagctcttttaaatatattattttgctgtttggcgagagaaagagagtaacaaagcacctatactacaaatcagcaaggtaatcgctaaactttgtccccatccagccagtgctaaaccaccaccaataagtaaatagtagaataaacctaatagtgcacccgctgtgcctaagcgatctttatattgcgctaaagccgtcgctaagatatttggaatagcaatgccataggcaacgacacttgtcatcattggaataataaaactaatgtgattgcgtaataaataaacacctacagcactaattactgcaataatacttgcaagtaatactaatttctcacattgccaatgatggcttaataatgctttattaatgtaagaaccaataccgacacctattgctaatacaataccactatagccaaaagtacttgcactataaccttgattatcaaacataaaaggtgctagttggtaataagcaaatagactgatattaaaaaaagcaattaaaagtatagtcttggcaatttgcttatctttcagcatttttatcgctgtttccgctagtggtgcggtttttattgttgcagggcgactttctggtaatgcaatagtactccacagcaataaaacgacggcgagaagagcaagaccactaaataccccttgataacctgcatagctcaccagtaaagaaccacttaacataccaatagccggacttaatgcgattgccgctcccataacggaaaatactttggctaattcttcaccactataaacatcacgcataatagtttgtgttcctacagagccaactgcggcaccaaaagcagaaagcatacgtaatatcagtaatacagaaaaattatcggtcataaagacaccaatacaagcaatggcataaataaataaccctgctaacattgttgggcgccggccaatgacatcacataaacgaccccatataatgacaccgagtgcaaaagcaaaaaagtagagcgaaagtgtttgccctgcttcattggcactgactctaaaaccatttgaaatatcagtaagtgctgggctataaatggtttctgcaatttgtggaaacatcattaacgcaattgctaaccatagagagagttttctgttcattctttgttttcctaaagcttgatactttgatgacagaatacagtgataataattgtcttgttatatatataaagacataatatttaccaaataggacaagtgatggcttggcttaatcaatacgaccactttgtgccagaagaacaccttgcatcagttgtgggtattgctgcagagatgggaaaacatgattcaggttttcactcacatgatagggggcagttactgtttactcaatcgggttgtatgagaattactttagcctctcgtgtatctgttttgccacccatgagaattgcctggatcccgccaaaactggaacatcgagtcgagatgtatgcggctgtaggttatcgttcagtttatattgccgataaatttcatcatcgtttcccaactgaaagcgaaatactgactatttcacctttacttagagagatattagagcgtattgccattgctgattttgacacccagtgggaagtagggcggtatgcaaatttattagctgtttttttagatgaaattcagcaagctaaacgtcaacctaatcatttatcaatgcccagtgatagacggttaagaaaattatctttcgatgaattacctccgccactacaagaattagcgcaatatattggcgctagtgaaaaaaccattactcgattattttataaagaaacaggattaagctatcaacaatggcgtcagcaatggcgattaatgaaagcgatagagttattagccacacatcatcgttatttagaaattagtcaattattagggtttgccagcgatagtgcctttatcactttttttaaaaaaatgaccgggcaaacaccacaagagtatttaagaaattgatccatgctaatagcataaagccccgcaaaaacggggcttagccagtcaataaatcgtgtttaaatcgatttatttatttttaagttcactatggaatttacgctcgttatagccagtatataactgacgaggacgtgcaattttcagtccatcttcatgcatttcattccagtgagcaatccaaccgatagtacgtgcaatagcgaaaatgaccgtaaacatatttgatggaatacctagcgcttttagaataatacctgaatagaaatcgacgttaggatagagttttttctcaataaaatacgggtcatttaaggcgatgcgttctaattccattgccacttcaagtaaactgtcattgagattcagttcttttaacacttcgtgacaagtttcgcgcatgactgttgcacgcggatcgtagtttttatatacacggtgaccaaagcccattaaacggaaagagtcattcttgtcttttgcgcgtttaataaattcaggaatatgttcaacggttttgatctcttccaacatacgtaaacaagcttcgttagcaccaccatgagcaggtccccatagtgaagcaatacccgcagcaatacaggcaaatggatttgcacctgaagagcctgcagtacgtacagtagatgttgaagcattttgttcatggtcggcatgaagaataaagatcctatccatcgcacgttcaagaactgggttaaccacatactcttcacaaggtgtggcaaacatcatatgtaggaagttacctgcataagacagatcgtttcttggataaacaaaaggttgtcctatggagtacttgtaacacattgcggctacagtaggcatcttagacagtaaacgatatgctgtgatatcacggtgaactggattagagacatcaagcgcatcatggtaaaaggcagctaaagctcctgtcacaccacaaagtacagccatcgggtgtgagtcacgacggaaaccatggaacagtcgggtgatttgctcatggatcatggtatggcgagtgacggttgttttaaatttatcgtattgctcttgggtcggtgcttcgccataaagcaggatataacatacttctaagtaggttgactcagtagccaattgcccaattgggaaaccgcggtgcagtaaaataccgttattaccgtcgatataggtaattttcgattcacaagatgccgttgaggtaaagcctggatcataggtgtaataacctttggagccgagagtacgaatatcaatgactttggaaccgagtgtaggggagagaacgtccaagtccacagaagtttcaccaatcgttaacttagctttgttatcagccatttataatctccttagcgcttattatgtctcctaacaaagtcgagggtatcttcataaagatgcacttcgatagtgaaactatagttgataaaaagtacctagcgagttttattttatggcttaacacgagtaaaaccgtaggtctatagtgtgtcacttttgttaaggagcttttgatgttatgttttttaggtgcttttttatgcaaggcacttagaatgtgttctgcttacacttttacataagttttcgatttctggaagcgtgtttgcgcacaaaaaaaacataaacattaaaaatatgcactaaatgtaagagaaatgttgtacatgtgtcaaaaatgataacgattattacattggatgtttgaaaaagtgatccctctcactgttcgaaccaaatgtctagcacacaagttgtgtggtaattgtaataagtttgtgaagcacttatactgcgcccaggtctccggaacctttgttgtatggagaaccagcgtaacgaatccacaatttttgtaaaatagacggatttaacattttacttaaagtgtgcctttgtaccccattcgctgcttaatttccatccaggtccggaggaaggaaaaattataaaagctgtgtgggcataaattgtgaaaaaacaaagacctgtcaatctggatttacagacgatacagtttccactccctgctatcgcatcgatcttgcatcgtgtctcaggggttatcatgttagtcgcagttggtattttactgtggttacttggcacctctctctcatctcccgaaggttttcagcaagccgctgatatcatgactggcttcttcgcgaagtttattttatggggcatcctaacagcattggcataccacatttgtggtggtattcgtcatatgttaatggacttcggctttattgatgaaacattggttgttggtcgtcgttctgcggcaatttcaatgattattaccgttattttatcaatattggcgggggtattagtatggtaagtaattcttctactttaggccgtacaggcatacaggattggttattcctacgtgcaactgccatcattattttcttatatgttttatattttgtcggttttgttgcaacaactgatattacctatgaagtttggcgtggattctttagctcctctctaaccaaagtttttaccctattaacgctactttctattctaattcatgcatggattggaatgtggcaagtgttaacggactatattaagccaatagcattacgcttgacgttacaacttattattgtcattgcgctgttggtttatcttatttatggaacaattgtggtgtggggtgtgtaatgaatctgccagttagagaatttgacgcagttgtaattggtgctggtggtgcaggtatgcgcgccgctttacagatttctcaaatgggtctgtcatgtgcactaatctcaaaagtttttcctactcgttctcatactgtttccgctcaaggtggtattacagttgctttaggcaatacccatgaggataactgggaatggcatatgtacgatactgttaaaggttccgactatatcggtgaccaagatgctatcgaatatatgtgtaaaaccggtccagaagctattttagagctggaacatatgggacttcctttctctcgtcttgatgatggacggatataccaacgcccatttggtggtcagtcgaaaaattttggtggtgaacaagctgcccgtactgctgccgctgctgaccgtactggccatgcactattacatactttgtatcaacaaaatttaaaaaatcataccactatcttttctgaatggtattcgctggatttagttaaaaaccaagacggtgatgttgttggttgtaccgctatttgcattgaaacaggtgaagttgtttattttaaagccaatgccaccattttagcgacaggtggtgcggggcgtatttaccaatcaacaactaatgcgcatatcaatacgggtgatggtgttggtatggcagttcgtgcgggtgtgcctttacaagatatggaaatgtggcaattccacccaacaggtatcgcaggggctggggtgttagtgacggaaggttgccgtggtgaaggtggctatctactgaataaagacggcgaacgctttatggaacgttatgcaccaaatgctaaagatttagcaggtcgtgacgtggttgcacgttctattatgattgaaatccgtgaaggccgtggttgcgatggaccatggggacctcatgccaaactgaaactcgaccacttaggtaaagaagttctggaatctcgtctgccgggtatccttgatctctctcgtacctttgctcatgttgacccagttaaggaacctattccggttattcctacttgtcactatatgatgggggggatcccaactaaagttaccggacaagctattcgcatgaatgaaaaaggcgaagatgaagtgatcccaggattatttgctgtgggtgaaattgcttgtgtatctgtccatggtgctaaccgattaggtggtaactcactgcttgaccttgtggtatttggtcgttctgcgggtgttcacttaaaagagtctttgatggagcagggcacgatgcgtgatgccagcgattctgatgttgaagctgcattaacacgcttacatcgttgggaaaataatcgttcaggcgaagatccggttgagatccgtaaagcattacaatcttgtatgcaacataacttctcggtcttccgtgaaggggatgcaatggcgaagggcttagaagagctgaaagtgatccgtgaacgcctgcaaaatgcccgactcgatgataattcaagtgaatttaatacacagcgtattgagtgcttagagttagataacttgatggaaacagcttatgccacagcggtatctgctaatttccgtacggaaagtcgtggtgcacatagccgtttcgatttccctgatcgtgatgatgaaaactggttatgccatacattatatcaaccgcaaaccgaaacaatgacacgacgtaaagtcaatatgcagccgaaactgcgtgaggctttccctccaaaagtgcgtacatattaattagcggtgttattgaagttgcggagactgaattatgaaacttgaattttcaatttatcgttataatcccgacgttgataatgcgccgcgtatgcaagattacacgcttgaagtacccgaagggcgtgacatgatgttgctagatgcattaattcaattaaaggaaaaagatcctacattatcattccgtcgttcttgccgtgaaggtgtatgtggctccgatggagtgaacatgaatggtaaaaatggtttggcatgtatcacacctatttcatctttacagaaaggaagtaagaaaattgtgatcagaccgttaccaggtctaccggttattcgtgatttaatagtggatatgactcaattctatacgcagtacgagaagatccgtccatatgtgattaacgacgacaaaaatcctccggctcgtgagaatctacagtcaccagaacaacgtgaaaaacttgacggactttatgagtgtattctttgtgcttgttgttcaacatcttgcccgtcattctggtggaatccagataagtttattggacctgctggactgttagcagcgtatcgtttcttgattgatagtcgtgatactgaaacagaatctcgtcttgatgatttaagtgatgcgtttagtgtattccgttgtcacggtattatgaactgtgtcagcgtatgtccaaaagggttaaatccgactaaagcaattggtcatattaaatcaatgttgctaaaacatagtgcataaattaataaccgccctaaaatagttagggcggttaatgaaaaaattaagttagacgtttgcaataagtagtctgtgtatttgtataagtttgtcttgatagcggtttttggaggcacctttaaacactgttagacagtttttaaaggttccttgagagtgaaaaactccaatattttaagaacctgcgagatagcgggtcataagagaaccttgcaatcgacaccgtttaataacggtactagttatccacggcgaactaaagctgtatagcttaagggatcataatgcagaacggcgcaatgaaggactggctagattccacatttctagcaggagagaatcagtcttacatagaagaaatctatgaagattacctaactgacccaaactctgttgacgaaagttggagagaaatctttcaacaactacccgtaagtcaaggcgcagaacagtcgcattctcaaacccgcgactacttcagacgcctcgcaaaagaatccactcgatatcatacctcggtaagcgatcctgcaatggactcaaaacaagttaaagttttgcagctcattaatgcgtttcgttttcgtggtcaccaaaatgctaatctcgatccgcttggtttatggaaaagagaatctgttccagatttagatcctgctttccataatctcaccaaagaagattttgaagaaacctttaatgttggttcttttgctatcggcaaagaaaccatgaaactcggtgatatctatgaagcactgaaacgtatttactgcggttctatcggtgctgaatatatgcatattaccaatacagaagaaaaacgttggatccaacaacgtttagaatctgtcaatgttgcagaccaatttactaaagaagaaaaaattcgctttttagcagaactgactgcagctgaagggttagaacgttacttaggggctaaattcccaggagcaaaacgtttctctttagaaggtggggatgctctgatcccaatgttaaaagacttaattcgtcatgcagggaaacaagatacccgtgaagtggtacttggcatggctcaccgcggacgtttaaacgttctggttaatattttagggaaaaaaccggcagatttatttgatgaatttgcgggtatacacaaagagcatttgggaactggtgacgttaaatatcaccaaggcttttcatctgattttgcaacagaaggtgctcaagttcaccttgctttagcctttaacccatctcacttagaaattgtgagtccggttgttatcggttctgtccgtgctcgtcgtgaccgcttagatgaagcgcgcagtaatatggttcttccgatcaccattcatggtgacgcagcagtgacagggcaaggtgttgttcaagaaacactgaacatgtcacaagctcgcggttatgaagttggtggtacggttcgtattgttattaataaccaagttggttttaccacatcaaatcctaaagatgcccgttcaacagaatactgcactgatattgtgaaaatggttcaagcacctattttccatgtaaatgcagatgatcctgaagcggtagctttcgtcacccgtttagcgttggatttccgtaatacctttaagcgtgatgtgatgattgaccttgtttgttatcgtcgtcatggacataacgaggcggatgagccaaatgcaactcagccattgatgtatcaaaaaatcaaaaaacatccaacacctcgtaagatctatgctgataagttagtagagcaaggtttaatcgaagctaatgatgttactgagttagttaatctctatcgtgatgctctcgatcgtggtgattgtgtcgttgaagagtatcgtcctatggggctacattcttatacatgggaaccttacttaaaccatgaatggaatgaagagtatccgcataaagtcgaaaaatcacgcttacaagatttagcgcgtcgtgtcagcacagtaccttctgaaatcgcaatgcaatctcgcgtcgagaaaatttatgccgatcgtgctgttatggctgaaggcgaaaaattactcgattggggggcggctgaaaccttagcgtatgccactttagtggatcaaggtattactattcgcctctctggtgaagatgcaggccgtggcacattcttccatcgtcacgcggttattcacaatcaaaccaatggttcagtttatgtaccattagccaatattcataacgcccaaggtcaatttaatgtttgggattctgtcttaacagaagaagcggtattagcatttgaatatggttatgctactactgagcctcgcgggctgactatttgggaagcgcaatttggtgactttgctaacgtagcacaagtggttatcgaccaatttattagctctggtgagcaaaaatggggtcgtatgtgtggcttagtcatgctgttacctcatggttatgaaggccaaggtccagagcactcatctgcacgtttggaacgctatctgcaattatgtgcagagcaaaacatgcaagtttgtgtgccttccacaccggcgcaggtttaccatatgttacgtcgccaagcgttacgtggtatgcgtcgcccattaatcgttatgtcacctaaatcactgttacgtcatccattagcggtatcgagcttagatgaattagcggatggtaaattcttacctgtaattggtgagttagatgaattaaatccagcggatgtgaaacgtgtcgtgatgtgttcagggaaagtttactacgatttattagaacaacgtcgtgctaatgggcaaacagatgttgcgattattcgtattgaacagctatatccattccctcatgatgatatggcacagattttggcaccttatgctcatgtgaaagattttatttggtgtcaagaagaaccgctaaatcagggcgcttggtattgtagtcagcataacttccgtgatgctattcctactggcgcaacattacgttatgcaggtcgtcctgcatcagcttctccagctgttggttatacctctgttcatcaggagcaacaaaaagctctggttgaagatgcactgaaagttgaataaataaggatagaaaatgagtagtgtagatattctagtaccggatctccctgaatcagttgctgacgcgacagtcgcaacttggcataaaaaacctggtgatagcattcaacgcgatgaagtgctggttgaaattgaaacagataaagttgtgttagaagtaccggcgagtgaagctggggtgctggatagcattcttgaagaagaaggcgctacggtaggttcacgtcaattattaggacgtattcgtcttggtgatagcactggtattcctgcggatgtgaaacctgcacaagatacgacgcctgcgcaacgtcaaagtgcagatattgttgcgaaagaaagcaatgatgctcttagcccgacagcacgtcgtttagtcgctgaacacgatattaatccagcagatgtaaaaggcagtggtgttggtggacgcttaactcgtcaagatattgaaagccatgttgctaataataaatcagcagcagcggccaccgctgaagtttctcaagctccattatcgcatcgtagtgagaaacgtgtaccaatgacacgtttacgcaaacgtgttgcagagcgtttattagaagcgaaaaatactaccgccatgttgacaacgtttaacgaaatcaacatgcagcctattaaaaatttacgtgcgcaatatggtgaagcattcgaaaaacgccacggtgtacgtttaggctttatgtctttctacattaaagcggtagtggaagcgttaaaacgttatccagaagtcaatgcgtctattgatggtactgatgtggtttaccacaactattttgatatcagtattgccgtatcaacacctcgtggtctggtaacaccggtattacgtgatgcagatgcgatgagcatggcggatattgagaaaaatatcaaagcattagcagtgaaaggtcgtgatggtaaattaaccgttgaagatttaacaggcggtaattttactattactaacggtggtgtttttggctcattaatgtcaacaccgattatcaacccaccacaaagtgctattttgggtatgcatgcgattaaagatcgcccaatggcagttgatggtcaggttgttattctacctatgatgtatctagcactttcttatgaccatcgtttaattgatggccgtgagtctgtcggtttcttagtgaccgttaaagaaatgctagaagatcctgcccgtttattactggatgtgtaggtaataaatatcgcttttaggcaggagatgctcctcctgcctctacagcaacatacacaagcatcaaagaagtacagtgtgttcgtgaagccagatttttctggcttatagtcaaaaaaataagaaagtccgactttcaacaagattatggatagaacatcatgaatttacacgagtatcaggcaaaacagcttttctcacggtatggattaccagcacctgctggtttcgcctgctccacgccgcgcgaggcagaagaagctgcatcaaaaattggccaaggcccttgggttgttaaatgtcaagttcacgcgggtggacgtggtaaagcgggtggcgtaaaagtcgtcaactcaaaagaagagatccgcgcatttgctgaacaatggttaggcaaacgtttagtaacttatcaaacagatgctaatggccaaccagtaacacaaatcttggttgaagctgcaacagatattgctaaagaactttatcttggtgctgttgttgaccgtggtacccgtcgtgttgtctttatggcttccactgaaggtggcgttgaaattgaaaaagtggcggaagagacgccagagcttattcatcgtgccattattgatccgctgacaggacctatgccttatcagggacgagaattagccttcaaactcggtttaaaaggcaaacaagttagtcaatttgctaaaatatttatgggattagcgacgattttcttagagcgtgatttagcgcttattgagatcaacccattagtgatcaccaaagatgatgatttgatttgtcttgatggtaaattaggtgtggacagtaatgcgttattccgtcaaccggaaatgcgtgaaatgcatgatccatcacaagaagatccacgtgaagcgcaagcggcacaatgggaattaaattatgtagcactcgatggcaatatcggttgtatggttaatggcgctggtttagctatgggaaccatggatatcgttaaactgcatggcggtgaacctgctaacttccttgatgttgggggaggggcaaccaaagagcgtgttacagaagcatttaagattattttgtcagatgaaaatgtcagtgctgtattagtcaacattttcggtggcattgtacgttgtgaccttattgcagacggtattattggtgcagttgaagaagtcggtgttaacgtaccagttgttgttcgtcttgaaggaaacaatgcagagttaggcactaaaaaattagcagatagcggtttaaatattattgctgctaagagcttaacggatgccgctaaacaagttgttgcagcagcggaggcaaaataatgtctattttaatcgataaaaacactaaagttatttgccaaggtttcactggaagccaaggaactttccactccgaacaagctattgcttacggtactcaaatggtgggtggtgttacaccgggtaaaggtggtacaacacatttaggcttacctgtatttaatactgtacgtgaagcagtggaagcaacgggggcgacggcgacggttatttatgtaccagcaccattttgcaaagactctattttagaagctattgatgcaggtattaaactaattattacaattacagaaggtattcctacgctggatatgctgactgtaaaagtaaaattagatgaagctggtgttcgcatgattggccctaactgtccgggtgttattactccaggtgagtgcaaaattggtattatgcctggtcacattcacttacctggcaaagtaggtattgtctctcgttcaggtactttaacttatgaagcagtaaaacaaactactgacgttggtttaggtcaatcaacctgtgttggtatcggtggtgacccaattccgggatcgaactttattgatattctgaagctattccaagaagatccgcaaacagaagcaattgttatgattggtgaaattggtggtacagcagaagaagaagcagctgcttatatcaaagatcacgttaccaaacctgttgtaggctatattgctggtgttacagcacctaaaggtaagcgtatggggcatgctggcgccattattgcgggtggtaaaggaactgctgacgagaaatttgccgcattagaagccgctggcgttaaaacagtacgtagtttagctgatatcggtgatgctgttaaatcgctattaaataagtaacatttttgttaattgcttctagttaaaactacatatcatgccaatctctgatcaaactggagattggcattttttattgttctattttatggcgcctttaggtgctgtcagcaagtagtcacgtgtatttttgttcgattttatctcatcttattgtttttaaatatatttttatttcattttttgtgtgttaaatagtgatttaaacacagcaataacgaaaatatggcgctaaacaagaatacctgagccctggtttgctaaaaaatgcggaatttgttttactcagcctaactgatatgaagagtaggggaaggcaaaaaaagggatacttttagtataatttttattcattaatactatgtgtataagatttactatagttaatttatattgtttaacgataccttattagcagataccccccctcaattattatcatttgttagtattattggaagggcacaatcttgccctattgcagtatggtgaaggtttcatagtgaaaaatgtattatagatacaataatgctcgaaagagaagtttaatgagtagcagagtaaccatgctaaaaaaccgaccttctaaaataacattaaactatcaactatcagctaaactttatagataaagcttaaaaataatcattcttcaatacagttatgccattttgctacccatatttaaaaataaaatgattgtatattgttgttttacaaaggaatattatttatttttatggcttaaggtatgattgctatagagtgtatgagttatttttattcaatggatagatacattatttatcctaaattaaactttgtattaaaaaaagattatcattataagagtttatttatgttttaggttcgctcgataaaactaaattaaaaaagataaaaaattaaaaatttattttcaacttattaattaatagattattttttttaaatatcccttttttacctgaaaaaaaatgtttttaatattagaattaatgaaatacagctaaatatgactatttaaatgtatttatgaaaataaaaagttaattttattatggaaattaatgggaggtaaattatacttaaaaataaaaccaacagtaaattaacattacggtaactattgggtaatttattcgcaactagttaacattaaagtgtttttttgatgtgggtcaagttattaattgtggaaaaattttctaaatatgcttaaattggcacacgatcaaatatgctgttactaacctaaaagtcgtattgttgacctaagctcagaattcaaatctgggtcacgcaaaatatatttattatatgtaaatataggcgtactatttgtaaggtattgtgtttttggtctttaatattcgttgttgtttttagaggcatttattgctggtagttatgaggctttatttattaattaaagtcgggttgccgcaagtcggtgtcttcctgctaggagcaaggagtcaagatgtttgatattgtcgaactgtcacggttacagtttgccttaacagcgatgtatcacttcctgtttgtcccattaacgctcggtatggcgtttatgttggcaatcatggaaacgatatatgtcctgtcaggtaaacaagtttacaaagatatgacaaagttctggggtaagttattcggtattaactttgctctgggtgtcgcaactggtttgaccatggagttccaatttggtactaactggtcatatttctctcattacgttggtgatatcttcggtgcgcctttagcaatcgaaggtctgatggcattcttcttagaatcaactttcgtcggattattcttcttcggttgggatcgtttaggcaagaagcaacacttaatggtaacttggttagttgcctttggttctaacttctctgcgctgtggatcttagtcgcaaatggttggatgcaaaaccctgttgctgcagacttcaactttgaaaccatgcgaatggaaatgttgagttttgctgatctggtcttaaacccagttgctcaggtgaaatttgttcacaccgttgctgcaggttactgtactggtgcattctttgttttaggtatcagctcttactacctactcaaaggtcgtgacatcggttttgcaaaacgttctttcgctgttgcggcaacctttggtatcgctgcggtattatctgttatcgtactgggtgatgaatctggttatgaaatgggtgacgtacaaaaaaccaaattggctgctattgaaggtgagtggcatacagagccagcaccagcttcctttaacttgattgcattccctaatcaagaaaaaatggaaaacacgtttgctctacaaattccatatgtcatgggtattatagcaacacgttcttttgatacgccggtattaggtctgcatgatctgatgagccagcatgaagtgcgtattcgtaatggtatgaaagcgtatgacctgttaactgaactacgttcaggtaacactgatcctgccgtacgagctgcatttaatgagtctaaaaaagacttaggctacggtctattattgaagcgttatactgaaaatgtttctgatgcaactgaagagcaaattaagtcagctgtaaaagattctattcctaacgtcgcaccacttttctggtcattccgtatcatggtcgcggccggcttcttgatgttactggttgttgcgatctccttctggactgttctgtctaaccgtatcggtaactacaaatggttactgcgtgctgcgctatttagtattccattaccatggattgctgttgaagcgggctggtttgttgcagaatatggacgtcaaccatgggcgattggtgaaatcttgcctacggctgtagcaacttcttcactgacacaggctgatattctcgtttctatgggacttatctgcggtctgtatactctgttcctcgttgccgaaatgttcctgatgttcaaatttggtcgccttggcccaagtagtctgaaaacgggtcgctatcactttgaacagaagacagcttcttctgcacaaagtaagtaacacaggagtccactatgtttgattatgaagtattgcggtttgtttggtggctactgattggtatcttactgatcggctttgcggtcaccgatggttttgatatgggtgtcggtgtgttattgcgcgtcattgcaaaagatgacacagaacgccgtattttaattaactctgttgcacctcactgggatggtaaccaagtttggttaatcactgccggtggtgcattattcgctgcatggccaatggtatatgctgcggcattctctggtttctattttggtatgatcttcgtactggcggcattattcttccgtccagtaggttttgactaccgttctaaattagaatcaccaaaatggcgtggtatgtgggattggggtatctttattggtagctttgttccaccattagttatcggtgttgcttttggtaacctgttacaaggtgttccattagaagtcgatagcatgcaacgtgtatcttataatggtacaactaacgcactaattaacctgttaagcctattaaacccatatggtttattagctggtgttattagcttaatgatgattgtggcacagggtgctagctatcttcaaatgcgtactaccggtgagctgcatgagcgtactcgtaaagcaacttacattacctctttaatcacttttattgcttttgcattagcaggcgtgtggttaatctacggtattgatggctttattatcactagtgcggttgatactgcgggtccttcttctccgttgttgaaaacagtttctcacgaagctggcgcttggatgacgaactacaacaactatcctattttatggatcttaccggcattaggtctgttaagtcctttattagcggttgttgcaactaaagcaaacaaaggagcttgggcattcctgttcacttcactgactattgcttgtgttatcctaacgtttggtgtaaccctgttcccattcattatgccatcaagcacattccctgatgtaagcttgacaatttgggatgcaacttcaagcctgttcactttacaagtgatgacagtagtcgcgattatctttgtacctatcgttctcctctacactatctggtgttactggaaaatgcatggtcgcctcgataagaaatttatcgaaggcaataatcatactctttactaaggagcatagagaatgtggtattttgcatggcttctcggcacactcttcgcttgtagtattgcggtgatcgcaggactggcttatgagcacgctgaagcgaaaaaaacttcagaaagtgaagaataatgttggataaaagttaccaactacttaacaagggcccaattagggctcttgttttaatcatggctctagcaatggcattttgtgttatgtgggatccgagtcgattcgcggctaatacaagctcattagcgatttggcaaggaatattactgatttgggctgtatgtgcaggggcagtttttggcttagcctatcgtcctaaacatgttgtagcgcaatatctattacatcccattcccgccattattattttagttgtagggctatattatttcttcttctaatcaaaatgccttattttaacctctagtaagtggcgtaaaataaggcattcacttcttgtatatgggttatgcaatattccccctcaccttttagggcatagaattaattctctcttttaaaaaatcaataaatagacgggtttttcttggcatatgttcaccatgtggaaaaatgacattaatagattgatttaataaggtaagttcaggaatagggctaacaagttcaccctgtgttatttcttgttgaatgtaccactctggtaatatagtcattcccatttgtttgagtgccatctgttttaatgcactaatagtattcgtttcgaaaagtgccattgagtgcaattgtgaaaatagttgattgattttatcttgttggctgagtttgctatggcgtaaattgctgtttgcaagatagggaactgccgctaaatctgcaatttcttggataggatattttttcaataaatgtggtgataccactaatttgattgtgtaatctgctaatttgcgatagcgataattactgtcttttaatgcgccaaggcgtatcgccaaatctaacttatgattgataagatcatcaatagaagaattgaatatatattgcacttttagttgagggtgtaaacacataaattgatgtaaaagtggcaatatataatgttcaccaaattcagccgttgaagttaatcgtaaagttccctgtaagttttgttgtcctaaccgtgccttatctaatgtttgttcgagttgaactaaaacttgacgaaaatcttgataaaggatttctcccgtttcagttaatgtgaagcgccgagtattccgattaagaagagatacatttaattccgtttctaatgctttaatatgaatactcaccattgatttacttaagcgtaaatactttgctgcttgtgtaaaagagcctgtatctactacggcgataaaagaacgaattcggtctatttgattttgcatgattgtttactctgattaaacaataagttctattttgtcagatagacgatattcgtcaatctttcgtaccctatagggcggaggattgctatgtcttatcgttatcaaatagccattatttttttactgggtttttttattgattgtataaatatttttatgtcggcaattgcattaccagcaattgcagcggatatgaaggtatctatcgtctccattacatgggtatcaaatagttatattttaggtttaacactgattattccattgagtcactggttatctcaacgttttggcgtgagagtattaatagtcagctcgatgttgatatttagtgcttctgtggcgttagtaggctattcacactcattttttgagctgattttatggcgttttattcaaggtcttagtggtggattattaattcccatcggccaagctttaacatttcagtattttcaagggcatgaaagaagcaaagtctcaactttaattatggctgttgctcttattgcacctgcaatttctcccacaataggtgggtttatcgttgatgctgtatcttggcgttgggttttttatagtaatgtgcctttttcattacttactgcgtttttggcttttatttgggtaaaagagtctaaatcacaagaaaatataataccagatcttaaagggatcttattaatcagtattattatcgtatcagggttatgtgcattatctgcttacggtgagtatcactctacacaattagcattagtcatcagtttttttgctgcattattttctcttctttattatcgtcattataaacagagtttatcaccggtaattaatctaaatttattaaaaaatagaaacttatcactttccatttttctctattactgtattccaggtgtttttactggtgtaaatattctggcgattttttatttacaacaatatctccatttttcggggcagggtacaggcagttttatgctgctatatgctataggtgcatttatttccattattgttggtggtgcactttataataaattgggtatgaagcgcttagctatattcgctttaattctgcacagtattggtattgtattattagcattagtaaataaagagagcgatctgcctttattaatactggcttatttaatgatgggaattggtggagggatcggtgcaaatacagcacaaacaacggccctttatgactttgataaacaaaggcttattcaagctagtgttatttggaatataaatcgtcaagttgtatttagtgttggcgcgacacttgttgcaatgatcttcaacacattatctctttttgtatcgtcacaaatggcttatagcacgacattttttatctgtgcaaccataggattatttccgctatttcttttcatattgttaaagcaaaaaacaaacttacaggaaacaaatcatgagcattaaaatagacccattaatagaaagtgtgcaagtgttgcataatgagattgaaactgtttttactcaaacccctattgctacacaggcattaaaaaatatagaaatgttacttgccaacacgttttctatgattggtataacaggaaagaaaataaattatgatgatgtaatggcaatgttttctcgtaatgcagggaaaaggccagaattgaggattgaaacagatagttataacattatttaccaatctgaacattgggcaacggtgagctatcgtgaaacgcattatgaaaataagaagattctcacccgtcaatctgtggtggttttgagacgcacgtctctagattgtcaatggcagtggtattacttgcatgaaacacctgtattagataattaattgattttaataaaaaaccagtaataagactggtttttttattggttgggaaaaagtttgaatcagagtgctaaactattaattgttaattagcaagcattttaatgctgaactaataaaaatattttttctattcaggcgctaaagcatattgcgtgttgcaaagaagagtttatgattggcgtctgaaaacggtgttttctattctttacgttactatgattcccttagaggcacctcttaagtatagttaacaaatctatagcttaattatttatgggattactcaaggagtgtaaggacggaattatgcggtttctttggccagttcgtgtctattacgaagatactgatgccggtggtgtggtctatcatgccagttatttaaaatattttgaacgtgcaagaacagaattactcagagaaaaaggtttttatcagcatgatttacgggagtatgatcatgttgcgtttgttgtgcgtaaattaaccattgactatattgcgccagcacggctcgatgagcttctgaaagtagaaagtgaaattactacattacgtggtgcatcaatgacattttctcaaaagcttatcaatcaagatggtgtggtactgtgtagggcagatgtattagttgtctgcgttgattcattaaaaatgaagcctgtagggcttcctaagtccattatcgcggagtttaagtagtggctgacatgaatgttatcgatctctttctaaaagcggggcttttagttaagttgatcatgttgttattaatcggattttctattgcctcatgggcgatcattattcaacgtacgaaagtattgaatgcagcagatcgtgaagcggcagattttgaagataaattctggtcaggcactgatttggctcgtctatataaagaaagccaagctcgtcgtgacgagttatcaggggcagaacaaatttttcattctggttttaaagagtttgcacgactacatcaagcgaatgttcatgcacccgatgccgttgttaatggggcttcccgtgcaatgcgtgtttcatttaatcgtgaattagagtccttagaaacgcatattccttttttaggtacggtggggtcaattagtccttatattggcttattcggtacggtatgggggattatgcatgcatttatcgctttaggtagcgttaaacaggcaactttacagatggtggcacccggtattgctgaagcgttgattgcaacagccattggtttatttgcggccatccccgcagttatggcttataaccgctttacgcaacgtgtaaataagttggaacaaagttacgataactttatggaagagttcctgacgattttacatcgccaagcttttgtctccgcagaaaagaaatagttaacgcaaaaggagagagctgatggcacgaggtcgcagtagccgccgaggcgtaaaatcagagattaatatagtacctttgcttgatgtgttattggtgcttttgctgatttttatggcaacagcgccaattatttcacaaagtgttgaggttgatcttccacaagcaacagaaacacagactgtttcaaccagtgataacccgcctgtaattgtcgaagttgcaggagtggggcaatataatatccgtgttgaacaagaggttttagagcttttacctcaagaacagattatggctgaagcaaaacgacaattagaaaaaaacccgaaagcggtctttcttattggtggcgctaaagatgttccttatgatgagataattaaagcactcaacatgttacgtcaagcgggtgttaagtctgtcggtttaatgactcagcctctttagtaggctgaaataagtttggataatagcgtgggaaagaagacgaaaccaatccgaagtaaattgagcggttcagttatcttgtctactgtcttgcatttactgatcatcgctttgcttatctggggatcgttaactcagaaatggaatttaggcggtggcggtggatctgatgggcaagttattgatgctattatggttgaccctaatgcggtagtacaagagtataatcagcaaaaggcgcaacaagctaatgtccaaaaagcagaacaagaacgtaaagcgcgggcgcagcaacaagaagaagagctacgccaacaacaaattaaagaacaagaacgtttaaaagcgttagaagtggaacgtttgcaagcaaaagaggctgcagaagctcaacgtcgtgaagcagccaccgccgctgctaaagcgaaagaagagcaaaagcaggctgaagaagctgccgcacaagctaaagctgaacgcgatcgtattttaaaagagcaagctgatgcgaaagccaaagcagaggcagaagcgaagaaacaagcagaattagcagcaaaacagaaagcagaagaagcgaaggcaaaagcagaagctgaggcaaaagcgaaggctgaagccgatgctaaagcgaaagcagaggctgatgcaaaagcgaaggcagccgcagaagctaaagccaaagcagcagcggaagctaaagcgaaagccgctgcacagcaacaaagtaaagcggttgatagtctactcgatggattagttgctcaaggcgataaacaatcgggggcttctgcagcaggtcaaggtggtggtaatcgctctggggcaaatgctgcgggcattgatcgctatactgggcaagtaaaagttgccatcgaacagaagttttttgattctgatttatataaaggtcgtaaatgtgaccttaaaataagtattgcaccagacggtatgttagtaagtgcaaaagcggtaggtggtgatccggctttatgccaagttgcattacaagcggctaaaatggcaacattgcctaagccaccgaaagatatttacgaacaagtaaaatcaccaacaattgagtttaagccataaaactgtctgatagtaggaaaacatacattaatttatctctattttagaatgttattgatgtgttgtatggtgttgtttaaaagcgtttgttactattctgtgcgttattgcgcaataaccgcaataataaaagggagacatgatgaagcaggcattaaatgttattttcggacttttgatattatgcgttacaacgctcgctaatgcagaagttcgcattgaaattacacaaggggtgaatactgcacgccctattggtgttgttccttttaaatgggaaggcacaggtcaaatgccagaagatattgctggagtgattgcggctgatttacgaaatagtggtaaatttaaccctattgatatgaatcgtttgcctcaacaacccgttaccgcttctgaggttcaacctgcactctggacagcattaggtattgattcagtggttgtagggcgtgttcagccctcggcagatggtcaatatgttgttagctatcaattagttgatgttgctggctctccgggagcggttttagcgcaaagtgagtataaaatcagcaataaatggttacgatatgctgctcataccgccagtgatgaaatctttgaaaaattaactggcattcgtggtgcgttccgtacccgtattgcttatgtcgttgtgactaatggtggcgcttatccatatgaattacgtgtatctgactatgatggatttaatcaagatcgcgtttatcgttcatcacagccattaatgtcacccgcttggtctcctgatggtgctaaactagcatatgtcacatttgaaagtggtcaatctgctttagttgtacagacattagcaacgggggaagtgcgtcaaatcgcttctttccctcgacataatggtgcacctgctttttctccagatggctctaaattagcctttgcactgtcaaaaagcggtagtctaaatctttatgtaatggatttagccagtggcaatatgacacaggtaaccaacggtagaagtaataatacagagccgacttggatgcctgatggacagactttggtctatacttcggatcaaggcggacgtcctcaaatttataaaattaatattaacggaggaacgccagaacgtattacttgggaaggaaaacaaaaccaaaatcctgcagtaagtcctgatggtagtttcttagttatggtgagttctgaaagcggtaggcaacatatcgctaagcaggatctagaaacgaatgctgttcaatatttaacagatacgtttctggatgaaacgccaagcatcgcgcctaacggcactatggttatttatagctccactcaaggcttaggaaccattttgcgactagtatcgactgatggacgtttcaaagcgcgtcttccggcgactgatggtcaggttaaatcacctgcctggtctccgtttatgtgatgcataagaattatgtatggcaaacaaataaaggaacaattagagatgcaattaaacaaagtgtttaaagggttgatgttagcattaccactcgttgctgttgcagcatgtagctcaaacaaaaacgacgatcaaacagatacaagcaacaatgtacctgttactgagcaaggccctactgctgaagaattagcacgtcagcaattagaacaactgaaacaaactaacattgtttacttcggttttgataaatatgacgttacttcagaatatgctcaactgttagatgctcacgctgcattcctgcgtgctaacccttcagtacgcattactatcgaaggtcatgctgacgaacgtggtactccagaatacaacatcgcgttaggcgaacgtcgtgcaaacgcagttaaaatgtatctgcaaggtaaaggcgtatcagctgatcaattagcaatcgtatcttacggtaaagaaaaacctgctgtactgggtcatgacgaagccgcttatgcgaaaaaccgtcgtgcagtactggtttactaagagaacggcatgaacaacagtaacttcagacctttattgatgagtctgttgttactggttggcgtagcggctcctgtagccgctattgcccaagcgccaatcagtaatatcggttcaggctctactgatgaacgactcgcccaacttgagcgtatctctaatgctcatagtcagcttttgacccaattacagcaacaactcgcagattctcaacgcgatattgatatgttgcgtggtcaaattcaggaaaatcaataccagttaaaccaagttgtagagcgtcaacgtaatatctatcaacaattagatagcctaaatggtggcaactcagcaccaacaacggatgaggcttcaacgggtggcaatgtaccttcaacatctgatacaagtacgagttcgtcgtcaacaggtgatgaaaaagccgattataacgcggcaattgatattgtattgaattcaaaagattacgataaggcaattgttgcattaaacaactttattaaaagttatccgaagtctagctatcaatcaaatgctcaattttggttggggcaaatgtattatctaaaaggtaataaagatcaggctgcgagtacttttgctattgttgtgaaaaattatccaaaatctcaaaaagcaagtgaggccttttataagatagggcttattatgcaagagaaagggcaaaaggataatgcgaaagctatttatcaacaagtggttaagcaatatccaaacagtgctggtgcaaaattagcacaaaagcagttagcagcactataattattggccccgtaatgtgaatgttacattttcggggttaactgattgttttttcagcgtttgaatgtttttttgaaaaaaaacgttgcacaataacattaaatcagtattattacccgccgttgccacagagaatgtggcgagttcgaaaagggtcgttagctcagtcggtagagcagttgacttttaatcaattggtcgggcgttcgagtcgcccacgacccaccattttcgaatttacataccattttatgaaatgggtcgttagctcagtcggtagagcagttgacttttaatcaattggtcgggcgttcgagtcgcccacgacccaccatttcaatatgcttttctagtcttttatcacacgccattctcattctatctaaaaatgctctctataactcgtttttgtatttattactcgagttactcaaatagaggatgtaaatagatagcttctccattgctgaaaaaactatctgatctcacttaagttggataatgacaaataatggaagtggttatttggtaatattcattttcagttaatagttcattatcaataaaccaatcgctaataagtgtttgagcttgtgttgccttttctatcgacaaaccaaaacgctttgatgcatcaataaaaaaagccatgataatacttaatgcagccgctgcttcataaggggtactcatagccagtgtgctttctaatgaacgtaatgagtaaaacttaggtaaccactcccgtaagtttttgccttgataccagacatcttgtgttgatgtttgcagagcaacttgctctagtaaacggatcaaccattcccttatatcactcatacgatattcagcgaaccaaaattcattacgtaagatagctatagcgatttgtgtggcttcaaaccaaaactcttgagccaaggcatcagcttgctctatggaaagggctgggggagtcacagtgctaatttctggaagttggtcacataaacctgttttatcaagtaaaacacgatagcctcgttgataaactggacttagaccattttgtttcatattgataattctttcaggctctgccatcaaaatatccatttttcggccttgagctaatacgtgcaaatagattggccagcgaatgccgttcggatcttcacattctgttgctaaagagacgaggtgtttaccaaattgtgatagccaatgttggttttttgctagctcagtcgcaccgtgaccaataagctctatatcaatatcagaatagctgtctatcttcttattacgacccactgagcctgttaataccacagcctcaattcgaggatcaagtaatgtaaaagataacatgcgatcgattaagcgggtgattggctccatatttctctctagttgttatagtagataaagttatttgttgtaagtatgaataaaaaaatagcatatttattatataaaacactttttgttttttatggtaaataaatggcattttgtttaatattttaaactaagtgctatcattgataggaatgtatatatatctttatcactttgcaacaatgtcgcaataacccatattttatttgttttttctatgattaagtcggggttgtcaaatggatgtcattagttggtttagtatcaataatattttagtcaatattccattaggaaaagaaggctatccactctcatggattgaagctatagggactattgctggattattatgtatatggcttgcgagccaggaaaagatcattaactatttatttgggttaattaatgtcactttattcgccattatttttttccagatccagttatatgccagtctactgctacaaattttcttctttgctgccaatatttatggttggtatgcatggagtagagtgaatgattttgaacaagcagaattgaaaatacgttggttaaagccgggccaacaaatcgtattaatcattgtctccattgctgccattattgcgctaacgtttaatattgataccgtttttggctatttagcagttattgctgttgatatcttaaatgtcttcggggcaaatttagccacacctgctatcgagccagatgcttacccattctgggattcaacaatgacggtactctccattgtggctatgatcttaatgacacgcaaattggtagaaaactggttaatttggtctgttattaatgtcattagtattgttatattttataaacagggtgtttatgccatgtctattgaatatatcatcttattggctatcgctattaatggctctcgtttgtggatcaaatcagcaaagcattcaaacaaaaataattatctctcataataaaaaaggctggtagagttatatttctctccagccttgctattcgttgtgtttattcttctattctaggcaatttcaaatcattattttacttaatggtgctattacttgttttcgatgtttttgttatctatcgtcatgggctgtttaggctcttaagggtgtttacagagagaaaacgaatggttagattgaagaaacagaaatcatattgactagataataatagagtggaacacgggaatgaattaccagaatgatgatcttaaaataacacaaatcaatgaacttttaccgccagtggcattattggaaaagtttccagccactgacaatgcggcgtttacagttcgtcatgcccgtgaagctattcatcaaatccttgctggaaaagatgatcgcctattagtggtgattgggccttgctctattcatgatcctaacgcggcactggaatatgctcagcgtttaaatttattaagagaagagctgaaagataaacttgaaattgtgatgcgagtttattttgaaaaaccacgtaccacagtcggttggaaagggctgataaatgatccacatatggactgtacctttgatattaatgaaggattacgcattgctcgtcgtttgctattaaccatcaatgatagtggattaccaacggctggcgagtttttagatatgataaccccacaatatgtcgctgatttgatgagttggggagctattggtgctcgaacaacagaatctcaagtgcatagagaattatcctccggactatcttgtcctgttggttttaaaaatggcacagatggcacaattaaagtggcgattgatgccatcaatgctgcaggctctccacactgtttcttatcagtaactaaatggggtcactcagcgatagttcgtactgcagggaataaagattgccatattattttacggggcggtaaagagcctaattacagtgcagaacatgttgctgccgtaaaagaaggtctgaaaaaagcaggattaccccaaaatgttatggttgattttagccacgccaatagctgtaaacaatttaagaagcaaatggaggttggtgccgatatttgccaacaaattagcgcaggagaaaaagctttaattggtgtaatggttgaaagtcatttagaagagggcaatcaatcattagaaagtggtgaacctttggtatacggtaaaagtgtcacagatgcttgtattgggtgggatgatacagaaacgttattacgccaattagccgatgcagtcgctactcgtcgtaataaatcataatagtctgtttttattaataaaaatgccactcaaaagtggcattttttttatctaattcaaagtaaaagtaaaattattttgctttaccttggttagcaacagccgcggcttttgctgcgatttcttctgcattacctaagtagtaacgtttgattggtttcatattttcatcaaattcgtaaactaaaggtactgctgttgggatattcagttcaagaatttcttcttcactcatattgtctaggtatttaaccagagcgcgcagtgagttaccgtgagcggcaataatcactttatcacctgaagcaacgcgaggtttaatgacttcttcccaatatggtgttacacggtcgatagttaacgctaagctttctgttaatggcagttcagcttcagttaaagatgcataacgtggatctttacctgggaagcgatcatcatctttagttaactctggtggggtaaccgcaaaaccacgacgccattgtttaacttgctcgtcaccgtatttttcagctgtttcagctttgtttaagccttgtaatgcaccgtagtgacgttcgtttagtttccagcttttctctactggcagccattgttgatcaacttcatcaagaatgttccacagagtgtggattgcacgttttagtacagaagtatatgcgtagtcaaaagtaaaaccttcagccttcagcagtttacctgcttcttgcgcttcattacggcctttatctgacaattcaacgtcagtccagcctgtaaaacggttttctttgttccatacactttcaccgtgtcgaactagcacaagcttagttactgccatagtttagactcctataattactttcttaatataagtttaaaatcaggactgcaatcattatatggatcatcaacaagaacgccaaacataactaacaaaactagggggattatgtcaaaaatgacgattgtttgatgaaatattacacagttattacaccttttgcttaatcgataaagctattaatttaacgggatcggtgaaaagaaacgaaaagccgattctggataattatcagtaaaaaatatgctctctaaatctatcgttaaaatcatcgccatctatcgataacaaatacccttttcttcagtgtgatgatgtatcttaccttaaaaatagcctatatctagttaacagggttgttgttggtaacgatagatatctccttctttaataaaaatcagtcgatgggtaatacagtgaggtgcatcttcttgatgatgactgacaaacagtagttgagtattgctatggcttatcatgatatcaataaagcgctgtactaatagtctattggttgtatctaatccttgtagtggttcatcgaggatcaataatgtcgggtgtttaaccaatgctcttacaattaatactagacgctgttgtccccatgaaagtgagtgaaaaggatggttagcgagtgcagttaaaccaattagtgttagccattcatccgctaatttttgctgtttatcggtaacggcttgataaataccaatagagtcatgaaaaccagaaataatcacatttttcacacttgaagagacgcgatagctttgatgtaaggcattactaacataaccaatatggcgtttgatctcccaaatggtttcaccactgcctcttttacgaccaaatagtgttaaatcattgctatagccttgaggatgatctcctgtgattaagcttaataaggtcgattttcctgcgccattaggacctaatatttgccaatgttgttgtggtttaacttcccaggttaagtgatggagcacaggtttatcattataactgaccacgccatccttaagtataataggggaaagcgttggtggtaaggtaggaactgcatcaacggagtctgaggcgggtaagatcagattttcaagtgtttcactgtgagataattgcgcaattactgagtctgataaaatatcactttttttaccttgtgccacgagtttacagtcaatcaataagccagcattttgcacaaaatcaggaatatcattaaagcgatttaaaataagaacaatcgttagcttttgttgatgtagtgatgaaagtaactcacttaatgtacgacgagagtcaatatctaaaccatcaaaaggctcatctaaaattaatagatcaggtttattcatcaataactgaataagcagtaccttacgagactctcccgttgaaagatatttaaaacgccttgataaaagtgcatcaataccaaattgttttgctaataacaggcagcgatcattatcttttacctgcatttggatcacctgagccacggttaatcccgtatcatcctcatcttcacttaataagtctgtattgttacgcagccactcttcctctatcattttttgtaatttttcaaaagagagattaatcggacgagtaaacctattaataagctcacccgataataaaatcccctcttggcataatgtattagcgagcgccgttttaccactaccattgctaccaacgaatgcccaactttctccttcattgatagttaaatcatcgatatgcaagcagagtgtatcacttaagcgaaacagtgtttttgtgagttgcaagtacttcattattattatccttgtttttattacaagtagaatacttaccaatatcggtttaattaaaacttgtcaatatttgttgctgatcgcttaagtaaaaatagtgcagagagaataaaaaagataaaagatgggcaagattatttatgttattttaataaaaacataaggactcgtttatatgaataacattaaaagggaatgtgttaactatttattaggattaatggcgctatttttattaacgataagtaagataacttttgcagaaataaataataatgtaaataattgcttcttaattaatgaaataaaaatagaaaggaatggtttattaactaataaggcacaaaaagaattaatatctaaatatataaataaatgtttaacattaagtgatatgcaacatatcattaaatcaatgactaatgcgtatattgaaaaaggctatattacttcacaagcttttattgccgatcaagatctctcaaatcatcagttaaccattaacgtaattgaaggaaagataaaatcaatctttattgataatatgacttcccccatggttgatattctatttccttcatatcaagataaacgacttaatttacgtgagttagagcatgggcttgaacaactaaatcgattaacaacatcacaatatagattagatattcaacctagtgacaggataggatactcgactatttttatttataagaaaaacaaaacgcatcctttcagaaatcaacttactattgataattcaggttcaaaagcaacaggtgaaatgttactgacgaataccacaacaatagattcgttatttggatttggagagcagtgggatctctccttaaacagtaatacagatttattacattcacattattatagaggctatacagcgagtataaatattccctatggctattggttttatcaatatcagttatcttataaccgttcttctcattttattaaaagttatagtaataaatatatctataaaagtataaatactaatcagcaagttgatattagtcgtttactttatcgggatagtaagaagaagataatattaaaaggcatattaaagcataaaaaagtaaaaacggaattagccaaacagccgatattaatcaatagcccaacattaacatcactatcattagccccccaatatcattttaatctgacatcaggttatttatctattaatccatcagcagaaattgggttgtctttttttggggcatcacctgattatattgctgaaaactcaccccgaagccactatagaaaattgagtctaaatatacattatcaatatttatttccttactctgtctcctatattacgtctttttatggtcaatatacatctgataatctttatagtgtggaaaaaatatccatagatggattaaatgcagttcgtggtgctaaacaaaataagcttagtgccaatagaggactttattggcgtaatgaaattaatacaccatggataaattcatttttaggtcaatggcgttttattacagctgttgattatggcgttatctattctgatcaatatgaaacaaagcagcagtctttattagctggcgctatggggctttcattttatcgttcccctttttcttcacaactattgataaacaaaccattcatttatccaaagtggttaaatgctaaccaatggtctttatcttggtcaatttctttcgctctttagataaggaagttttttatgcataaaaaggatatttcgcgaaaacagcgtttaataagctattgtgttatttatttaaccgctatttacccattgcatcctgcttggggctctgtcattacttcatctgataaaacgataacaataaaccagcaaaataatattcctattattaatattgcaacacctaatgacagtggtgtttctcataatagatttaatgtctttaatgttaataaacagggggcagtacttaataattcgcaagttgatgccaatagtcaattagcaaaaaaaatatctgctaataaaaatttaaaaggtaatacggctaatttaattattaatgaagttgtcggtaatagtcgttcacagttattaggtaaattagaagttgcaggacaacaagcggatgttttaattgctattcctaatggaattagttgtgatggttgctcatttattaatactccatcaattactctcacgacgggaaagcctcaatttagccctcaaggtacctattcggcactagaagtaaaaaaaggcagtattgttattggtaagcaaggtatgaatgccgatttgcaaaattatgccgatattattagtcgtagtattgaaataaatggaaagataaatgctaaaaatctctctttaatgcaagggaataaccatattgatttcggcaaagggacagtaaatagcattaatggagaaggtgtaaaaccgaccgtcgctattgatacaaaagcattgggtggaatgtatgccaatcaaatacgcttagttagcacagaaaaaggggtcggtgttaatttaactgatattcaaacaaaacaaaatagtatcaatttaacagttgatggcaaaattacctttaatggcaatattcaatctgagcaagatattaatgttagtagcaaagcgctacaaatgaatagtaatgccagcttaaaagcgcaaagagatattacattagcaactaatacgctaacgaatcatagtgatattatcgcagaaaaggatatgcgtttattcgtagataaattcactaataaaggtgaaaaagcgcttattcaagcaaaagataatttatggatacaaaaaaatgcacagggtgaaccaagtagtttaattgaaaatcaatcagccaccataaaaacagaaaagggtgatttgattattagaaccaagaaattggttaatgaatctattactcctttatttaaagaaataaagcaagagcctgattctacatcgtctataaatataggtactcattttcttcatccttacaatagtcctacgaataatttccttataattattttacttgctgaattaaaagaactctctgataaaaagtggtttgatatattagatttaaaaaataatggaggtgttaatgtagaacgctcattatttgaaaagaataaaaagtatgttcctagtgttatttattctggtaaaaatttatatatacaatctaacgagttttttaatacccaatctgatatttttgcaactaatgatcttatcgcaacaggaaacaatgcaaaagtatactattatcggtttggacaccttaataaatgggatctttattctcatgataatgctcatattttttatcgagatgatgtaaataaatataatattgatgaaactaaatttcaaaaaatagttcattttattccctttactaaaactggaagtcattatgaatttattgtagatagtgcttctgaatatatgataaaagcaggtaataatttagttttagattttaaagatagtatagcgttagaacgtaaatttccatttttagaaaaagaaattaaaaagtatagaagaatatctgattttgaaagtactatattagctaaaaatatactattaaatgctaataatttaaatatctcattaaatttaaaatcaagtaactctttatctgttattgctaataaaaatataaatataagtaattcaaatttattatctggtgatattataaatttaacagcaattgataatgttaattctgaaaatatagatgtaacggcaaagcatttttccatcataactaagaatggagatattaattattcatttagccctatagcctcttatactctgaatagcattaaggcaccatttattgatgtgtctgaaaaaatagacttttattcaggtaaaaacatttacatttcaaatgtaataattaatgaatcaaatgaaaaaagtttatcagcattagagaatattaaaataaaacgcgatgagtctttatttttcaacctaatgccaaattttagagatgaacaatatatttcagcgtttttatttaatatggggttttggaaaagtaagaataatataagcttgatggctggtaaagatattgttagtcagggaataaaatattatagtaacaaagaaataacttttaatgcaggacaagatatttttcttgcctccaaattaataaaagaagccgctccttttttcagtgatatttattacccccaactacaatctaaattattttcagataataaccttattttaaatgccgcgcgtgatattgatttaagttcaacagtattaaattcaaaagataaagttattgtattagcgggtagaaatataaaactgggtgcaaatgcttattccgccatcgaagatccccacgaagatgcgcaagacattcaatatgccaccacatccattatgggaaataaaggtatttctattgcatcatcaggctcactcacaacagaaggaagttcacttaaatcagagggggatattgctatttccagtggtggcaatatccaattgggatcagtaagaacacattttcgtaaagagtcggactcagagttagaagaacttcgtaaacaagtcagtactgaaattaatagcggtaatcatctaacactattatctgagggcagtattttatttcaggcctctcaattggctgctaataaaaagatggatattgctgctaaaggtggatttctttatgcacaggcaatggaagaatccagttactatgaagaagaaaagaaaaaatgtaattggtggacactgtgtgcgactaaaaagaaatataccaaaacatttaataacacaacgaataaagttaccgagtttattgctaatgacgatattaatttaattgctaaagatgatatcactttagaagcaagcaaattagagacagcaaagaatgccaaattaaccagtaaaacaggaggcattaattttaaagcggtgaaagatactgcttttaaacaagttattactcgttcaaaagatatatatatcactcaacgtaatcagggatacaccaagggaacatggctattacctgaactctatattggcggaaagctgactatcgatgcgccaaaaggcatatctgcagatattaaagccaaaaaagagcaatctttagagcaggcattaactgccttaagtaacacaccagaatatgcttggcttaatgcgctccaaggtcaagaaaatattaattggaatttagtgaaagacacttattccagttgggatgataaaacccagcagttaaatccagttgttggtgcggttattgccatcgcggtaggggttgcaacttatggtacggcaacagctgcctcaataggaggaatggcaagtaatgccactattgctgcaggagcctctgcgggggttgcgtcaacggcatcagttgcggcacaagccggttttgcttctttagtttcgcaagctgcggtctctttagccgaaaatcaaggcaatatttctaaaacatttggcgccttaagtcgcagtgatacggtgaaatccattgtcaccagtatgaccgttgcaggcgccttgcaaggtcttgaccaatttatgggttgggatcaagcaatacaggggggaacattaccgacaacaggcaagttgcttgcgacggataatgccacatggactcaagttgctcaacgcgttgcctcacagtcagtagtgagttctacactgggcacagccattcaaggtggcagttttattgataattttaaaactgcgctattaagccatatcggcagtcaatttcacgctgaaggtgccaatctcattggtgataacggtgcgatattagggcatgcaggaaaggttttaagccattctgttgttgcaggagtgagtgctgaaattgcaggaggcagtgtaacaggtgcagtagccggcgccttggcagcagaaatagcggcaatatcgctacaaagtaaattatttgagcctagttatttaaatgaaactgacagacaagttgcattaattcaagaggcactacatggcaatgaaggaaaaacacagctcactaaattaattggtgcactgacaggcgctattgtgactcgtaagcctgagggcgtattttctgcggctaattctgcggagttagtttatcgacataattacagcgaacatatgctttcaaagctagcactagaaaataataaggacataattgcagcgtcaaaaggtgatgttgcagcagcagaaagagttgtaaatcgacaaaatgcagggatgattgcgattgctcttggtttaggaggaagtgcgagcattattggtggtcacactgttattgcagcaacaccagaacttattgctattacgcaagctgcatttagtacatgtaaagctaattgggtttattgtgctaatcagctaggtattaatatcgctgggatatcagctccagaagctgcaatcgctggtgtcaccgttggtactggttataaagtattagctagttcagaagaaagtgctaaagctttctctagcatgttagctaatagttcaaagtctttaatgacttcaggaaaattaaatataactgctataaaaccgatagtagaacaagaaaaattattaataactaccaacaaaaaagctattgaaataatcaataacggggagtttataatatattcaggagtaactacgaatggatataaagtatctaatggagccaaaaccgtagtttttaaaaatgaattagaacatcctattgttcaatctaggattaatattaaagtgggagatgttgaatcaggttggttgcatgtacaaaaacgtcatttttcaggagcgcaaaatgctagccaatttacgcttagtgaacaggaaattaaagatatattattaagtcctgctgtcattaagattcctattaataaaacgagagaatcatataataaaaacaccaatagtattgatattttgtatgaaagagtgattcagcttgataaaaatataggaattgataaatttagtaaacagccaactaacataattactatgctcacagataaaaatggaaatttaataactactacccctggggaaataaagtgatgacaaatgaagcttttttaaaatttaaggattcagaaaataaaattatcattccgtacctcaaaaaagtatttccatcattgaaatcagcatgttgtttatatcatatgatagaacaattagaggatgtttatacttacttaattaatagcaaggatgttatttttattgaagtgtcgaggttaaataattctattaaccatacggatattttatcaattaaagattatgctattatgaaaaaggggaaacaatatcatcgttatatgaaagagattattgctttatcaaatagtgagataattaaatgatagtttatggatggaatattagattaataaattatatataacaatacaattataacgttaaaaatccattgtattggcaaagtattaattgcatcaataaaaaaagcttttacacgttgtattagtcgaaaaaccatcacttaatataatttttaaaatatcaattaagtgatggtgttatttttactgaaaatccatcatgctaataattaacataatgtggcgataatcacctgatcggcattaaataacgctgttacggtatcattaatatgtagcttttgttgtgtaacatgctggttagaacaagtcgcacacacttctagtccaccttctaacgttaccactaattcactattttcattgcccgtttcaatttgggttagggtgcctgatagcgcattgtcatattgttgtgctacagaggcgcctttttctatattgacccatggcgctttaattaaaacgagtacttctttgccttctttaagatttagacgatcggcgcttttttcagttaacgccgcgcgaataaccgttttttgatcagcaagctgaacattaacatgttgttgtacttgtaagtgatcgcgttcaataatggtgccaaaaaattggtttctggcactggtctgtaacgaaaaacgtgaaatagccgctaaaaggctgtctaaaggtaatgaatcgtcttttaatacatcaaaggctttttgttgaatttgtcctagtagatcataaagttgtagtaagcgttcacaataatgagtcagtgtagcgcctccaccccctttaccgccagttgctctatcaaccaggagttcgtcagccagttgattcatttcattgatggcgtcccaagcacttttataactaatgcccgccattttcgccccttggctaattgagcctgttgctttaatttgttttaacagcgcaacacggcgtggatcagcaaagagcttatcttgaagtttcagtgtcagtaatatttctgcttgcataatgataggcttcttctggtttgtctgtttatcgcattttttgtgccgacacaaaacgataattctctagaatagatacaactatagcgttattattcgttattcgtgaagaaatgccaactctggctttccgaatataccatgataaagaggttatcatgtttgaattattgaaaagtttagggttcgctctcttgatggtacctgttgtgatggtacttatcatgggcattatttatggtttaggcgagatttttaacttaatttcacctagtcagtcaaaggctgataaaaaagcataattacccctctatttagaacagccctttattgtgaagggctgttttttaatactcctcaaatactcctcaaatactcgtcatacttcaagttgtagcgttgttgactgcgtttattcgcactagtcacatacttatgtatgctcctagcgactcattcacttgtcgcctagctacaccttgaattatttagagtatttagtatttagctatttaacttcaagttgtcgcgttgttgactgcgtttattcgcactagtcatatactgatatatgctcctagcgactcattcacttgtcgcctagctacaccttgaattatttagagtatttatcttttagctatttatcttttagctatttaacttcaagttgtcgcgttgttgactgcgttcattcgcactagtcacatactgatgtatgctcctagcgactcattcacttgtcgcctagctacaccttgaattatttagagtatttagctgttagctatttaacttcaagttgtagcgttgttgactgcgtttattcgcactagtcacatacttatgtatgctcctagcgactcattcacttgtcgcctagctacaccttgaattatttagagtatttatcttttagctatttatcttttagctatttaacttcaagttgtcgcgttgttgactgcgtttctatctccattgctatcgccatttttgtctccctatttatcgctatatttattgatatataaccaattttaatcaacttatcctttcattttacgttatatcttgatatatacagcgtggttattgtcctatttaagtggaactcaacatgaaaaaattatcaggtaagttactggctggtgcgattatctcttttgctttagtgagccaaagcatggcatcggaaaaaataacggtatttgcggcggcttctctcactaatgcgcttaatgaaatttcggcacaatataaacaggaaaaacaagcggatgtcgttgcttcttatgcatcctcttcaacacttgctcgccaaattgagcaaggagcacctgcaaatctatttatttctgccgatcagcagtggatggattatgttattaataagaatttaatggtgactgattcacgacatacattattaggtaacgacttagtgttaattgctcctaaagatagcaaattaaacaatgttgttattaataaggatactaaatggaaatccttacttaatggtggaaaattagctgtgggtgatccagatcatgtacctgttggtatctatgctaaagagtcattagaatatttaggtgcatgggatgtggtgagtccggaaatggcacgcactaataatgttcgcagcggcatggcattagttgaacgagatgaagcaccattaggtattgtctatggctctgatgctgttgccagtgacaaagtgaaagtggttggggtattcccaactgatagtcacaaacctgttgagtatccaatggcagttgtaaaaggacaggataataaagctgttcgtgatttttatgactatctaaaaacacctcaagccgcagaaatatttaagaaatacggctttagcccactttaggaattatacttttggagatgttaagtgaatacgaatggcaagcgattcttttaagccttaaggtatcgacaattgcagtaataattagtcttccttttggtatattgatggcttggctattagttagggttcgttttcccggtaaatcattgcttgatagcattattcatttacctttagttttacctcccgttgttgttggttatctattattaattagcatggggagacgcggatttattggtgaatggctatataattggtttggatttagttttaccttcagttggcgaggggcggcacttgcctcagctgttgtggcatttccactgatggtaagagcaattagactagcactagaagctgtcgaccaacgtatggaacaagcggcaagaacattaggcgcatcaccattacgtgtcttttttactataacgttaccattatctatgcccggcattattgcggggatcgtattggcctttgctcgctcattaggtgaatttggcgccacaatcactttcgtctccaatattccaggggaaaccagaacgatccctttggctatgtatacgttaattgaaacaccgggggcagaaatggatgccgcccgtttatgtgtcattgcaattattttggcgctcgtctctttaatggcttcagagtggctaactcgttgggggcgtaaaagattggggggcgtatgctagagatgaattttaaacagacactgggctctttgtgtctggaagtgaatactcaattaccaacagaaagtatcacggcggtatttggcttatctggcgcaggtaaaacgtcgctcattaatgtgattggtggtttaaccaaacctgattcaggacatattgtgttaaataatcacacattggtggatattgagaagaaaatttatctgccacccgaaaagcgcaaagtaggctatgtatttcaagatgcacgactatttcctcattataccgtaaaaggaaatttactttacggtatgtcaccaacaatgaaagtacagtttgatagaattatttatctattaggtatcgaacatctactttcgcgttttcctattacgctatctggtggtgaaaaacaacgtgtggctattggacgtgcattattaactgcacccgatattatgctaatggatgaaccattggcctctcttgatttaccccgcaagcgtgaattattaccctatttagaaaaactttcacaagatgtacaaatacctattttgtatgtgagccatagtctagatgagattattcgacttgctgataatgtgattgttatggatgccggaaaaattaaggcaatgggtaagttagaagatgtttgggccagtagcgcattacgcccttggttacaaaaagagacgttaagcagtgttgcaaatgttatggtcgttgaacatcatagccattatgcgatgacggcgaccgcctttggtaatcaagtactgtggttgccacaaatagaggcaaaaataggtcgcgatgtgcgcgttcgtattgatgcttcagatgtatcgttaactaccactcgcccatcaaatagtagtatccgtaatatattacatatgaaagtggtcgaaatgatcaaacatgatgatcaggtagatgtgaaactggttaatgatggcaattatttatgggcgcggatcaccccttgggcgagagatgaactcaatattcaagaagggcagtggctttatgcgcaaataaaaagtatttcactaagtcgccatctttaatttattgatttataaaaataaagcctcgtcatagatgaggctttgttgtttgaatagcaagtatttaagacaaaatatatttatgaatagtctctgcaataccgggctgattattatttttagtcaccagtttagcgcgtgctttgacctcatctgatgcgttgcccatagcaacacctaaaccaacatgctctaacatacttaagtcattgaagttatcaccaaacgccataacatcactcatcttcatgccattagcttcaacccaacgctgtaaacggcgacctttgctattacctttcttggcgatatcaacttgatcgacccaagaccattcacactctaagccgacttgttgttctacttgttcgattaaagcacgtaactcatcgtgattgggggttgtggtcgctattttccagatagaatcaacatgatgcattgcttggtaaaaatcatctactttgactaaattagggcgttgtgccagaggaagagtatcagcccaattaagtgtacgttgtacggcagcggtaagttgatcatacatcattgcatcatctgcatagactaaatgatgcacatcggtttgtttaaccaagtcgagtaccgcgcgtgtttcttcgggggttaaaggatcagattcaagcacttttttaccgaggtagtcgtaaagataagtaccattacaacagatagcgggtgtatcaagatctagcgcttgatagaatggatgaatagcaacatggtgacgacctgttacaatgagtactttaacgcccgcttttctggcaagattaagagcagttaaagatcccggtaggatacgtttttggtcatcaagcaatgtgccatcaagatccagtgcaataacgcggtacgacataataagccccttgatagtataaagatgcaatgatgctgatgttacacgttaacctagcaaagataaactagcttaatcgtgacaggtatcagttggttaagttattattctttataaatcaataggtaatcgattttaaggagaaaggatgaaacaggtagtctacgtagcaagtccagagagtcatcaaatccatgcgtatacattaaatagcgcgggagagatgcatctactgcaggttgttgaggttgcaggacaagttcaacctatggtggctagtgcagatggaaaacatctttatgttggcattcgtcctcattttagtgtggtgacctttgaaatcgcacctgatggccagttagaacaaaaagcaataacggcaattccaagtgcgccggttcatttgtgcttggataaaaccgaacgctttttgtttgttccttcttatcaccaaggtaacttagcggtattgccgattaatcaacaaggtattgctcaagcaccaatacaacttattgaaggattaaataaaccacactcttctaatattgattggcataacaagcagcttattgttccctgtttaggtgaagatcatattcgtctatttaatctttcagaagagggacatttaagtgaagcgcgtagcgaagagttaaccacagcaataaatgcagggccgcgtcatttagcgttcaatcctaatggcgaagtgttttattgccttaatgaattagatgcaacaatcaatgtttatcgtcgtatgggtgatctttatcgtttaatgcaaaccatcgatattgtgccagaaactttcaatagcacacgttgggccgctgatatccatattaccccagacggtcgtttcctctatgccagtgaacgttcggaaagcttgattagtgtaatggcagtttcagaagcaggggatcatctacaacctgtaggtcattatacaacacagacacaaccacgcggttttaatcttgataatacaggaaattatctcatttcttgcggtcagaaatctgattttgtctctgtttctcgtattgataggcaaaccggcgcattaacggaattagcttgttatccagtcggaaaaggggcgatgtgggtcactgtagtcaccaaataagtattgcttgctctctagcggtagatgatgccgctagagatattaaaacaaaataattaattggtaagattaactgctttctcaattgcttgagtgagtttagtgagcttttcaggtgatataatataaggaggcataatataaatcagttgaccaaaaggtcgtatccaaaccccttcatcgacaaagtatttctgtagtttagccatattgactggctcaaccatttctacgacaccaatagcaccaagtacccgcacatctttaacgctttttgcttgctttaagggtaacaattcggttttaagttgatcttcaatttgagcgacttgattaacccagtgaccttgctctaatagtgataaactagcattcgccaccgcacaggcaagaggattccccatataggtagggccatgcataaagcaacctgcatcaccttggctgatagtatcggcaatatggcgtgtagttaacgtggcggatagcgtcatataaccacctgttaatgctttacctacacacataatatcgggggagatccccgcgtgttcacaagcaaataatttaccggttctgccaaatccagtggcgatttcatcggcaattaataacacattaaattcatcacataacgctcgagcttgtgttaaatactctgggtggtatatgcgcataccaccagccccttggacgattggctctagcatcacagcggcaatatgttgatgatgttgcgctaatgtggtgcgtaaatcgtctatatcagtagcgtcccacggttgataaaatccggtttttggcgcttcgacaaacagatgattcggcaggtagcctttgtagagactatgcatcgaattgtcaggatcacacaccgacatcgcaccaaaagtatcaccatgataaccgcgttttaatgccacaatgcgctggcgtttttcaccttttgcctgccaatattgcaatgccatttttatcgccacttcaaccgctacagagcctgaatcagcgaggaaaatacactctagtggggcgggagtgatagccaatagttttcgacatagagcaaccgctgagggatgggtgataccaccaaacatcacatgggacattgctgctagttgttctgttaccgccgtattgagttcagggtggttatagccgtggatcgcagcccaccatgaagacataccatcaattaattgtttgccattcgctaaagtgagttcaaccccttttgcacttacgattggataagccggtaatgggttactcatcgaggtataagggtgccaaatatggcgtaaatcaaaagcaatatcatcgggtgtcattttactttccagttaataatgtaaacctagtgtgatcaattttagttgacatgataaccctattatttaaactggcaatcacttttgaacaggagaatgtattgtgagtacgttaaaacgttggacattaaaagaagctagggcactgtttgatatgccatttttagatttggtttttcaagcgcaacaagtgcatcgtcaacattttgatccttcacaaattcaagtcagcaccttactgtcgataaaaacaggcgcttgtcctgaagattgtaaatattgtgcccaaagtgcgcgctataaaacagggttagaaaaagagcgcttaatggaagtacaacaagtgattgaatcagccaaaaaagcaaaagcagctggttcaacccgtttttgtatgggcgcggcttggcgtaatccacatgagcgtgatatgccttatcttgagcagatggtcaaagaagtgaaagcgctaggtatggaaacctgtatgacattgggtaagcttgatgattcacaagcctcacgcttagcacaagccggactggatttttataaccataatcttgatacatcacctgagttttacggcagcattattaccacccggacatatcaagaccgtttagataccttagataaagtacgtaatgctggcattaaagtgtgctctggaggcattttaggtttaggggaagaggtcaaagatagagccgctatgttagtgcaattagctaacttaccgcaaccgccggaaagtgtacctatcaatatgttagccaaaattaaaggtacgccactggctgataatgaagatgtcgatccctttgattttattcggactattgctgttgctcgtattatgatgcctcgctcttatgtgcgactttcagcagggcgtgaacaaatgagtgaacaaacgcaagcattctgttttatggctggcgcaaactccattttttatggttgcaaattattaacgaccacgaatcccactgaagataaagatcaccaattattccgtaagcttggtttaaatcctgaaagattatctgtctcaatgggcgatcagcaacaagaagacgtgttgctacaagctgttgctgaaaaagacaccgaacaattttataacgcggcactgtaatgagttggcaaaactatctagataagcgacttaatgagcgtagaaatacgccattatggcgaaaaagacaggtgatccagcatagcaatggacgctatttaaccacactgtctggtgataaatatgttaatttttctggtaacgattatttagggataagccaacatcctgatgttattcaagcatggcaacgtggtgcgaatgaatatggtgtagggagtgggggatcgggtcatattaccggttttacacaggcccatcagcagttagagcaacaactcgctgactggttagggtacgatcatgcgctattattttcttcaggttatagtgctaatcaaggtgttattgcgacattacttgaaaaagaagatgccatcattgccgataaactttgtcatgcttcattaatggaagcggctatcttatcaccggcgagtttatggcgctttttgcataattctgcgccatctctatctcagcggcttcataaaacctctgcgaataaaagcttagtcgtgacagaaggggtttttagcatggatggtgataaagcgccattagcggctatggcagaaataagtcaacagcatcaggcgtggttaatggttgatgatgcgcatggtattggcgtgttaggtaaagaaggtaaagggagttgccatgaagcagggattaaacctgagttattaatagcgacttttggtaaagcctttggcattagtggtgcggctgtactgtgtaataaggcgactgctgagtttttcgaacaatattcacgtcacttaatttatagtacctcaatgccccccgcacaagccgttgctttacatgcagcgttaaaagttattaaacaagatgatgaaggacgagaatatcttcaacaacttattagctttttccgtcaaggtgtctcatcacttccagtcacattattaccttcacaaacagccattcaaccgttaattattggtgatgaactacgctgtcaacaactttcagactatttacaacgtgaaggtttctgggtaaaagcgatctttccaccgactgtaccccctcacagcgcacgtttacgcattactttaacgactcgtcaccaaatttccgacattgcgatgttaatcgagcttcttcatggtttcttcaatcaaaacagataaacagcagatagcccagtgttttagtaaagcggctagccattatgatcatcatgcctctattcaacgttatagtggtgataaattgatgtatttagctcgccaccaagctggggatagggtgctagatgcggggtgtggcactgggtatttcagtcaaaaatggcgacaacaaggacgatttgttatcgcacttgatttatctcatgccatgttacaagtggcgagacaacaacaacgggctaattgttatttacaaagtgatattgagcactgtgcgatcaccccccacagcatagatatcgtttttagcaatttagctatgcagtggtgtgatgatcttgccattgcggtaaatagcttaatgagtgtcgtcaatccacaaggggcgctctatttttctacgttagcaacatcaacgttacaagaggtacgagatgcttggcagtttcttgataaccaccaacatgttaacccgttcctctcttaccaacagattgaacaagcctgtagtggttttcaatatcaatttgtgactgaaaaggtgacagaacaatatgcatcattgcctgagctttttacctcattaaaaggggtaggcgcgaattttgtgcaaggagaacggccaaaaggattaatgacacgccaaaaactgcgtcaattagagcaagtttggcgcaaaacagactctggtaaatatttacttacttatgaactcgttataggaaagatttctcatggctaaaacatggtttttaacaggaacagataccgaagtcggtaaaaccgtcgtaagtagtgcattattacaatgcgctacacaacaaggatatcaaacggcgggttataaacctgttgcatctggcagcgaatggttacctgaaggtttacgtaatagtgatgcattaacgttacaacagtttagtagcgtccctttggcttatcagcaagtgaatccctattgctttgaaacccccacatcacctcatattgtgagcgaagaaacaaaacaacctattgattttcaggttatgtccaaggggttatcttatctgcaacaacgcgcagattgggtattagttgaaggtgctgggggatggtttacgccactatcagcaaaccaattctttgcagattgggtgattgaagaaaaattaccggttattttaacggtgggtattaaattaggttgtattaatcatgcattattaacgcaacaagctatttggcaatcagggttgactttagcgggttgggtagcaaatgaagtagagcctgccgggcggtatcaacagcagtatttagctactttaatggcgcatattaaagcaccacttttaggtaaaattccttatttaacacaagacgttaaacaacataattttacctcttatcttgatctctcttatctcaaatcacattgatacatcatcattgagtcaattttaacagcttattttcatgtataaaaaaataaaaaaattattttttttgctaaatattagggttatttttaataagaaaaaaagctgtaacctaccgtggtataagcactttgttcagttatccactattcctgtggataaccttgtgtattaccataataaaaatacgccaaatatagagaatacaaggcattgctaaagattggtgttattctcaacttttattttttattgtttattattaataagttaaataaaatcaatagtgcgaaagcgtcaactcactctcagtgatttatccctaaaataaggggttgattttttaaaaaactttttgattaaaatctggggataacttaaatccgttattcagattattttttgtaagatagagattgaagctggatttttatccagtatcataaggagtgtctgcgaggagataagaatatgagcaaagtttttaaactgcattcagaatttaaacccggtggtgatcaacctactgctatcgcttcattatgtgaagggttagaagatggacttgctcaccaaaccttattaggggtaaccggatcaggtaaaaccttcactattgccaatgtgatagctaacctaaatcgtcctactatggtattagcgccaaacaaaacgctagctgcacagctttatagtgaaatgaaagagtttttccctgaaaatgcggtggaatactttgtctcttattatgactactatcaacctgaagcctatgtgccaagctccgatacctttattgaaaaagacgcctctgttaacgaacatattgaacaaatgcgtctatcggctacaaaggctctcttagagcgtaaagacgttattgtggtctcttcagtttcagctatttatggtttgggtgatcctgatagctatttaaaaatgatgctacatttaagcaatggcatgattattgaccaacgtgcgattttacgccgacttgctgatttgcaatatacccgcaatgatcaggcttttcagcgcggtactttccgagtccgtggtgaagtgatcgatatctttcctgctgaatctgatgactacgctttacgtgttgaattatttgatgaagaggttgagcgtttatcgctatttgatcctctcacagggcaaattcattacaatgtgccacgtttcaccgtctatcctaaaacccactatgttacgccgcgcgagcgtattctggatgcgatggaaaaaatcaaacaggagctagctgaaagacgtaaggtgctattagccaatgacaaattggttgaagagcagcgagttacccagcgtactcaatttgatttagaaatgatgaatgaattggggtattgctcaggtattgaaaactactcccgctatctttctggccgtgggcctggtgagccaccaccaacgctatttgattatttgcctgctgatgggttattagtgattgacgaatcacacgtcactattccgcaaattggcggcatgtataaaggcgaccgctcacgtaaagagacgttagtggaatatggcttccggttgccttctgcgttggataaccgaccattgcgttttgaagagtttgaagcattagcaccacaaaccatttatgtctcagcaacaccgggcaaatatgagctagaaaaatcaggtaatgacattgtagaacaggtggttagacctacaggcttacttgatccggtggttgaagttcgccctgttgccacacaggttgatgatttattatcagaaatacgtatacgagcagctaaaaatgaacgtgtattagtgacaacattaacaaaacgtatggcggaagatctgaccgaatatcttgaagagcatggtgaacgggtacgttatttgcactcagatattgataccgtcgagcgggttgaaattatccgagatttacgtctaggtgaatttgatgtgctggtggggataaacttacttcgtgaagggttagatatgcccgaagtctctcttgtggcgattttagatgcagataaagagggattcttacgttcagaacgttcgcttattcagacgattggtcgtgctgctcgtaaccttgaaggtaaagctattttatatggcgataaaataacagattctatggcgaaagccattggtgagacagaacgtcgtcgggaaaaacagcaacaatttaaccttgaacatggcattgtgccaaaaggcttgaataagaaaattggtgatattcttaagattggtcaaccgactcaaggccgtaataagaaaggacataaagcggttgatactcatgaagattatccattactttctacggctgaattagaaaaagaaattcagcgcttagaaacggaaatgtatcaacatgctaaagatcttgaatttgaaaaagcggctcaaacacgggataaattacaaactttgcgtgcgcaatttattgctaattcttaataagaacatttaagtagattagcttacagggggcgttataacgtttataacgctcttttttgttatttctttatcactttttatttattttgttattcccttcctggcaatcaactgtttaaatattacaactaacaaacagtcaatgatttacaaagataaaaaagacattaaggatagtgaatgagtggttatgtgtatgcagggtttccaagctctgtaggagtcattattggtgtttttttcctcgtggtactttttaagtggttacgcaactttgccgtgcaagacaataaattatcaacctctgcaatgccagcaacaactgatccagagtctgcgttatctactccaacaacggaaggttcagtaaatcagctattacctaatgaatggggattatatgttgcagccccttatgctgtcatgaatgaatgggcatataacgaatataatcaaggtaaagatgatggtgggctatcagcggcttggggagttaatgatcggtgggatttaatctaccaattattttggttgctgactcaaggtcataccaatgacttttaccagttacgtgaccagattttgaatggcaaagaagaagatattcaatcattaaaaaacgatattttattatctgatttaactgaaaatgataaaaatgaacgtttatggcaaatcgatatgatgaacaccaatcgaatgaatatccaaaatgtaaaatatcttatttgggatctttgtcgttttaacaagctttgcttagaaggctgccaacaaggttatattacccagcaagaagcacaaacatggtcattaatgagtgcatcaatgctacgtcgtatttatgatggttgggaagatatgtggcaaaactttattgctactcgttggttatgggcaagtggtgatcaaaattgggcatcatcacatcaaacattttccgatgtcgtacaaaatatactcaaagcagaaaataccttagcgacagaagaaaactgggtaatggagctacccccattagatttaatgtcttttacacgagccgtagctggattaggttttatgaaaaatgatgtgcctatgacactggctgaaatagaagaaatgatcagcgaacgcattactttaaaaacacttaatagctaattgtctatttgtaaaacaaaattacacagttaaagtaagaaaataatctaataaagactaattaaccgcactgagatagataatgattttagtgcggttttttgattggtataacgattaactcgctgtacaagcggtattacgttgacctaattgctgaagtgttaattcaatagctttacttaataggtgcctatcatgacggtaaggaatatctttcgcctctaattgcgcttgaacaattaatcgtcctttcattgattcatattgtgtttctggactaataatcacagcatcaatagtttgtaagccaatataggtttccatcatggcgattttatctgacatcgtcatacttgcagccgcagggctaagctctttacctaaattaccaatataaatagtagtggcactgctacgacgtaatgctttagctaaatcaggtagcaacaataaaggcatcaaactggtaaaaaaactgcccgggccaattaaaattaaatcagcttgctcaatggcttcaatggcttctcgtgtggtggtgacgtctggatagagttttaattgacgaggcatcctcggtaaattatctacattgacctcgccatagatttcatttccttcatcatcaatggccattaaatcaaccgcttgttctgacataggaataagatgagcattgactctaagtagaccgcggataagattaattgcttctaatgggcgaacgcttaagttatctaaggcctttagcataagattacctaagttgtgtccagcaagctctcccgtgcctgagaaacggtattcaaacatcgcagaagcaacggaaggctctgtgattaattgattaatacaattgcgcatatctccccacgcgataccgccttcgtctttacgaatacgtcccgtggagccaccattatctgttgtcgtgacaatccccgtaaggcgagttcctaaataggagagtgctgaaagcacacgtccaaggccatgacctccaccaagggctacaacacgatctaaatcacttagcgtgcgatttcgcataattgtcttactcacttttaaaaatttgccgctaatttatcacaattataatttaagcctatgatcacggcgtgatttcatcacattcttaatcttgaatgagtatcgattgctggttatttagacaaataaaagggaagagtaagggggagtgtaaatagaataaaaataaaaaaagtgttgtaagtcgttgtattataaattatataacgaaaacaatattcgctttttattaaataaacaggtaaaatccacacataaaatattggtataagaacctgttaaaaacaggtaaagattaactcctagccttaacatctaagtcaacaagctttatccaaaggatatgatgttctggccgtgactaactaagtcaccagggtgcacggtagaaatgcccgcatctcccgaatttggaaaggtgttattatgcaacaacttgttgatgcgttttcccgcaaatttttctatttacgtctatcaatcacagacgtgtgtaatttccgttgcacttactgcttacctaatggctacaagccaaatggtcataagtcctttctatcactggatgaaatccgccgactgactcactcttttgctgaattaggcacagaaaaaatccgtttaacgggtggtgagcctacgatgcgtcgagattttaccgatattatcgcgactattaatgaaaaccctgccattaaaaagattgctgtgacaacgaacggctatcgtttagcccgtgatgttgcacaatggcgtgatgcggggctaagtgcgataaatgtcagtgttgatagcttagatccccgccaatttcatgccattaccgggcaagataaattccatcaagtgatggaaggaatagacgctgcttttacggcaggttatgacaaagtgaaagtcaatgttgtgctaatgcgcaacgtaaatgataaaaacttgcctgattttctccattggatcaaagacagaccgatacaactacgctttattgaactaatggaaactggtgatggtagtgatgtttttaatcgctttcatttatctggtgaagtgatccgccaacgtttacttaacgaaggttggctacaaattcctcgcgcccgtagtgatgggccagctcaagtctttactcatcctgattatcaaggtgaaattggtcttatcatgccttatgaaaaagacttttgtgtcacctgtaaccgtttacgtgtttctgcgattggtaatcttcatctttgcttatttggcgaaaatggtattcctttacgcgatttattggctgatgatgcacaacaacaagccctacaacagcgtattcagggtggacttcttcataaaagagaaacacattttcttcatcagggcgatagtggtattacccctaatctttctgtgattggtggataagttttttcgctctgttatttagttaatttcaggagttgtgcatgtctcaactaactcatattaatgctgccggtgaagcgcatatggtggatgttagcgccaaagctgaaaccgtacgtgaagcgcgagcagaagcctttgttgaaatgtcagcagaaaccttagcaatgataaccgaaggtcgacaccataagggagatgtctttgctaccgcacgtattgcgggtattcaagcagccaaaagaacatgggaattaattcctttatgtcacccattgctgttaaccaaagttgaagtccatttagaagcccttacagactcaaatcgtgtgcgtattgaatcagtgtgtcgcttaacgggtaaaacgggtgttgaaatggaagcactcactgccgcatcagtagccgcattgactatctatgatatgtgcaaagcagtacaaaaagatatggtcataggatctgtgcgtttattagaaaaaaccggtggtaaatcgggacactttaaggtggatgcatgattaaggttctttttttcgcccaagtgcgtgaattagtgggtgttgattcactggaattacaaaatgattatccaacagtggatgatttacgccgtgctttaattaacaaaggcgatcgttgggcattagcgcttgaagatggcaaattgttatccgcagtaaatcaatcctttgttcaaggcacttatgccattaaagacggtgatgaagtggcttttttcccacctgtaacagggggctaagatgagtacattgacccgtatatcagtccaaaacgaacattttaatgttggtgatgaatatcaatggttgtcagagtgtgaaagtgatggtgcggtcgtcacttttacaggaaaagtgcgtaatcataatttaggtgatgaagttaatacgctaactctagagcattatcctggtatgacagaaaaggcgttaaatgacattgttgagcaagcacgcgcgcgttggcctttacaaagagtcagcgtcatccaccgtgttggccaattaaatattggtgaagagatcgtgtttgttggtgtgaccagcgcacatcgccatagtgcttttgaatccgcagaatttattatggattttttaaaaacgcgcgcgcctttttggaaaaaagaggggctatcagctaaccaagatagatgggttgatgctcgccaaagtgactatgattcagctaagcgttgggaataattcatcaagtgaaatcaaagacaacatcactttacttaaatttattttacggtgacattctatacagtttatttcgtggaaatgtaacattagtgtgataaaattaatcactaatgagtccataatgggctctttactgaaataaacgttatcgttaaattcaacgttatcactatgattaaagggtaatcatcatggatcgattttcacgttcaaatgattcaatcgtacagcgcactggtacaggtctacaaacctttatggcgcaagtgtatggctggatgactgtaggtctgttacttactgcatttgttgctctgtatgttgcatccagcgcgactttaattgagatgatcttcactaataagatctttttctttggtttgattatcgctcaattagcattagtttttatattatccggtatggtacataaaatgagtggtgcgcttgccacaaccctctttatgctctattccgcattaacaggtgtcactatttcgagtgtgttaattgtttatacttactcctctgttgctagcactttctttatctgtgcggcaatgtttggtgcattaagtgtttatggttacaccactaaacgtagtttaactgggatgggtagcttcctgtttatggggcttatcggtattatcattgcttctattgttaatatctttatgcaaagcagcatgatgagcatggttatctcttacgcaggtgtactgattttcgctggtttaaccgcatatgacacacaaaaattaaaggatatgggtagcgaaattaatcaagaagataaagaaaatatgcgccgttactcaattatgggtgcattaacgctttatttagattttatcaacctgttcttaatgttactgcgtattttaggcgatcgtcgttaatcataaactgcgtcgtttaataaccgcatagttaaatcccataacctcttcagttatgggattttttgtatttataaaatacgggcagcaagtcgttatttatagcgtgagatgtttattcttatctatcaaggtacagattttatactatcttcctgcagaaaagataataggcaatagagcctgtcccaatagcaataacaatcagtgcccataaactatgccatattacggtaatatcggcatttttgaggtagatttgtttggtaatatcagtgaaatgacggattgggtttatccatgtggcttgctgtaaccaaactggcatattttccactggagaaatatagcctgataataatactgcgggcatcataaatacgaacacaccaataaatgcttgttgttgtgttgaacttaacgcggaaatcaaaagcccaaaacctaccagcgataaaccgtaaataagcatggtaaagtaaaataatagcagtgagcctgaaaaaggtatttgatagccgaaaataccgataattaatacaatggttccctgtactgccgcaacaaccatggcaggaaccgcttttcctacaaagatttgccaagttgataacggtgaaactaatagctgatctaatgtcccttgctctcgctctctagcaacagacagtgatgttactatcattactccgatggtgataattaaggccactaaagaaggcacaataaaccatttatagtttaaattggggttataccaattacgtactactaattcgcttttattcagtaaagatggggtatcgccggctaattctgtttgataattttgcacaatttgttgtacataatttgccgcaatttgtgcactattagaattacgtccatcaagaattaattgtaattttaccggagtatgactggctaaattagcactaaaattttgtggaaaacgcaccaatagcaaggctttacgattattaatcgtctctttaatttcatgttcactttttaataatagggtttcagaaaaagcactggctttggctatgcgttgggttaattcaatagattgtttaccattgtcttcatcaaaaatagcaacagaggcattggtaacatcaagggtggcagcaaaagggaataagatcatctgaaagataaccggtaatattaagataatccgtgtttgcggctcttgtaataatgactgtagctctttcattatcagggtgagaagacgatgaaacataaaaactctcccttattaatctaagcgacgacgtgttgctaacgccgttaagccaataaaaaagatggctgaaacaattaatagccacatatctagcattaagatcatcggaatatctcccgctaagaagagtgtctgtaagctactaacaaaataacgtgcgggaataaaataggtcactacttgaataaaaaatggcatgctatcaatttcaaacacaaagcctgataacatcaccgcaggtaaaaaagccgcattaagtgagatcattgccgcgttaaattgattgcgagttagggtggagatcaatagccccatacctagtgcagtggctaaaaatagtgaagtaatacccgctaaaatccataatgagccacggtaaggcacgcctaatatatagacagtgaccaacatacatagcaccataacaaaactgcctaatacttgataaggaataagcttggaaagcagtaattctgtgcgtgtaatttgggttgagagtaaggcttccatggtgccacgctcccattctcgagcgataaccaaagaggttagaatagccccaaccacggtgatgataatagtgacggcaccgggaataatatagtgttggctgatggcggcagggttaaaccaataccttggctcaatttcaattaatggttgctgctgaatgccttgacttaaagcttgttgctgtaaccagatttgccaaacccctttggtataggcttgtacaaagtttgcggtatttggctcactaccatcggtgatcacttgaatgggagctttgctatcttgtcgggctaataattgcgcaaagtcgacaggaataaccacaatgccacgaatttctccggcttgcattttatcgataagcaattggcgattatcgctgatggtggcgttaatatagggagagttggtaaaagtatacactaactcttgtgccggttggctttgttggttagttaatataccaatatttaatttgcttgaatctaagttgataccgtaaccgaaaataaacagtaaggtgagggggataacaatagcaataagcgcgctactgggatcacgggtgatttgtttagtctcttttaaacaaagagcatataaacgtcgccaagaaaaatgtgcaggtgatgattgagacgaattactcatgtttttcgctcccttggtgattttcttgttcaagttttttatcgtaatccagtactaagccaataaaagcatcttccatagagggggtcggattttcttctgttgctaccatctgttttaatgaatccggctcgcctgctgcaataatttttccgcgataaaccaaaccgatacgatcacaatattcagcttcatccataaagtgagtcgttaccatcactgttacacctttatccaccattccattgatatgaagccagaattcacggcgtgttaaaggatcaacccctgaggtaggttcatcaagaaaaagaatatctggctcatgcatcaaggagcatgcaagggcaagacgctgtttatagccaagaggtaaggtatcggtgatttggttaatcattggctgtaagccaaatgcggttatcatatcattgattttattgcgctgttgcttaccatataatccataaaccccagaaaaaaatttcaggttttgccccacttttaagttgctatatagcgagaatttttgtgccatataacctaaatgttggcgagctttacctgagctgactttcagatccatacctaacactaatgctttaccactcgttggtactaatagcccgcacatcatcttaaaggttgtcgattttcccgcaccgttagggcctaataacccgaaaatctccccacgtttaacttggaaatcaacatgatcagtggcggcaaattgaccgaacattttcgttaattgttgagcttcaataacggtttcatcgggtgctggggggatttgtggcatgatctccgccagttcagatttatgagaagggccaccacctaataaatcaataaaggcatcttcaaagcgcggtgtcgccgggataagttttgcatctggttttcctaaggcgtttaacaatgctgtttggtcactgtgtttttttaagatcaatcgtacagattgcccttggatcacgccatcggtcacttgaggttgtataatggcttgttgcaatacttttcgacgctgatgaccttcaacattgagtaaaaaagagcgtcccgccattttagccgttaaggtctgaggtacaccgctataaagtaattcacctttattcagtagcagaatatttttacattgttctgcttcatcaagataagaggtactccataagataagcatgccatcaccggctaaggtatgaaccatttgccaaagctctcgacgggcaatgggatcaacaccaacccccggctcatctaataacaggactttgggactacctaatagagtacaagctaaccctaatttttgtttcatcccaccagaaagattacccgctagacgagaggtaaaacgtgttaagtcagtaaaagagagtagctgttgataaactctttttctctcttcaccgataacattttttaaatctgcataaaggttgagattctctagcacagtgagatcttcatataagccaaatttttgtggcatataaccgaggatagccctaacatcaacactctgtttttgcggatccattcctaaaattttgatctcaccagcatcaggttttagtaatcctgctagcatgcggattagggttgtttttcccgcaccatcagggccgacaagacctgtgactgaaccaccggtaatggtggcggtgagtgaagcaaccgccggtttttcaagcccaacaaagcgtttttcaacaccgcttaaattgatggtgtaatttgtgttatccatattgattgcctctcctcaacttaatgagtcggtgcaaatttcaaggtcactggcattccttggcgtaatgaatcatcagcatcggtgacaaccactcttatacgataaactagatcagtgcgtagttccggtgtttcaacgcttttaggggtaaattcagcggttggcgaaacaaaacctatagtgccatgataaggcttatctttgcgactatcggtataaagatacacctcgcgattaggtatcgcttcacctaaatgattttcactaatataagctctaacccacacagggttagttaaagaaacagtaaaaacagggcttcctgctgataaaatagtgccaggctccacagcacgagtcagtatagttccttctgcaggtgaggttaattgggtgtcttgaagattaagctctgcttgggcaactgccgctttggcttgaagtacttgacctcttgccatatcaatatcttcttggcgataaccattttgatattgattgagtttgtcttgtgctgcttttaatgccgcagccgcttggttacgattattgcgggcactgtctaagtcattagctgaaataactttgcgattagcaagatcttgttgtcgcttataaaagttttcagcatattgccatgcggcacgttttaatgacacatctgactgggcttgtgcaatttcttcactgcggtaaccagcctccattaaggctaatgaagcgatggcactatcacgttcaccataagctttatttaatgcattaatgtaaggtgcatcatcgagttggcctaataattgacccttggtgaccggcgcaccttcatcaacttgtagttccgctaacttgcctgcaacacgaaaacttaagttaaccgtccgaatatcaacatttccatagagtactaactcaggatctttgttctcttcataataatagatacctgcgataataccgataataatcattaagataataaagacactgatttttttcgttttcataataactctatttatatttatgcatggttgttatgagtatagatctctcttagtccatcaagtagtaaagtaatatgtacttttaaggtattagaaataatttcatattcctgtttaccaattctatcccatccagtttggcgtaaaatggtttctcgtactaatcgaaatgatagcacctctcccaaaatagcgtgagtatgtagcatggtttttggtaaagttggatctaagccaatataaagtgctaataaacgatttacacgagttaatagcggagataacgcttgctggtggataagggaataggcttctgtgggaacaagttgttctcttgccataatgcgactgatatgtacattgcttttatcaagtacgagtcgggcatattgcaaaaaactgtcaatgatcagtttttgtaataggggtaagtgctctgttggattaggtttttcaagaaaatcatcaagttgtgcaacggtgggttcaaaatcaattcgaattaaatcggcaatatactgtgcaacagcgagatataacccttctttagagccaaaatagtaagcaatagccgcgatattttgcttcgcagcttgcgcaatctggcgagttgtggcgctatcaggcccatttttaccaaagatttcacaggcagcttctaataactgtcgttttgcaagttcccctcgagttttcttttggtgtgtgtctggcataaggataccttacttaagtaaaatgtaacaaagaaataacattaaaatagtcgttattgaaagtagtatattcgatgatattgagtaacaggataaatttgtagtaaataatgaaataaagatgacatgtaataaaaaaaacatgatttatttaaaaattatttttatattcgcaagatagcaaaactgttaaaatgaccgctattaggttaacctgataaggttcattctctttcaccttgcggtgaaagcccgtcatttttaatttcaatcaccgtgttatgcgttctggttgtaggagatttctgttttgaccgattttacatcgcttggtttaagtgaggcgcttctccgcgctattgatgaacaagggtataaaaccccaacccctattcaacaacaggcgattgagccgattttggcgggtaaggacgtattagcaagtgcacaaacgggtacgggaaaaacggccgcatttacattaccgatactggaaaaactcgctacatcagcagagaaaacgaaagggcgtaagccagttaaagcgcttattttaacccctacacgtgaattagctgcacaaattgccgataacgtaaaagcttatagtcgttatttacctattcgttcattggtggtttttggtggcgtcagtatcaatcctcaaatgatgaaactacgaggtggcgtcgatgttttgattgcaacaccaggccgcttacttgatcttgaacatcaaaatgctgtcgacttatctcgcgttgaagtattggtgttagatgaagctgatcgtatgttagatatgggatttattcatgatattcgtcgagtcatcaataagttaccgaaaaaacgacaaaatttactcttttcagcgactttttcaaaagagataacagggcttgctaactcactactcaacaatcctataagtattgctgttgcccccaaaaactcagcggctgaatctgttgatcaatatgtccatttagtggataaaaagcgtaagacagagctgttatcacacttaattggcctagaaaattggcctcaagttcttatttttactcgaactaaacatggtgcgaataaattagctgaacatcttaatttagatggcatcaaatcagcggcgatccacggtaataaaagccaaggagctagaacacgtgctctagctgattttaaagacggtaaattaaaagcgttagttgccactgatattgcagcgcggggacttgatattgaccaacttccttatgtggtcaactttgaattaccgcaggtagcagaagattatgttcatcgtattggtcgaacagggcgtgcggcggcaacaggtaaagcgatatctttagtttgtgttgatgaacatggcttattagccgatattgaacgcttattaaaacgtgaaatccctcgtttagcattagaaggttacgatcctgatccctcaataaaagcggcgcctttgcataaaaagccaaagaataaagcacgtaataataaagaaggcggacatggtcgtgctgatattcgtggcaaagataatcgccatacaccacgtaataaaaatagtcgtaatcaaaaagagagtgaaacgggtgagataaaacagaataaatctaaaccagctagacgttcacgcaaacacgatgatgatcgtgataatcaaaatccttggtcaaaagctagaaaagaattttgaggctaaactgtgcgagtcctattagcgccaatggagggggtgttagacccccttgtgagagatctactgacggcgattaatcattacgatctctgtatcacggaatttattcgcgttgttgattcattattaccgccaaaagcattttatcgtttatgccctgaattacacacccaaagccgcacgcaaagtggcactttggtgcgggtacaattattagggcaaaatccacaatggttggcagaaaacgcttttcgagccgtctctttaggttcatggggggttgatcttaattgtggttgtccttctaaaaccgtcaatggtaatggtggtggtgcctcgttattaaaacaaccagaaacgatttatcaagcaactaaagcgatgcgtggtgctgtacctgcggatttacctgtttctgtaaaggtacgattagggtgggattgttcatcttattgccatgaaattgccgatgctgtagaacaaggtggcgcgacagaaattactatccacggtagaacaaaagaagatggttatcgtgctgataagataaactggcaagcgattggtgaaattcgccaaaaattgactattcccgttatcgctaacggtgagatttggtgtcgagaagatgctatctcttgtttaaagataaccggctgtgatgcgattatgataggtcgcggggcgatgcatacgcccaatttaagtaatgtgataaaaggtattgaagaaaaaatgccttggtcacaagtgatccaattacttaaacgctatattcgtctagaaaagcaaggggataccacttattaccatgcttcccgtataaaacagtggttgggatatttaagaaaagagtatcaagatgctgatgcactttttagtcaaattagaacgctaaaaacctcacctgaaatagccaaaataatagaagcgttataataaccacaataggttattaatagccaaaaccagcattaataataaggtgctggttttttctataaaaaggtaaaaatatctgaatatgaaaaaaataattgctgtttaagtacaattattggaaaaaatcactatttcgtcttacactcttaaagtgaccatttttaatatactatctatattatcactacatttagggggaactatgggatttctttcttggattgtgttcggtcttattgcgggtatcttagccaaattcttaatgcctggctcgtatgatatcggccttatctggacctgtattctaggtattgtgggtgctgtagttggtggtgtaattagtaatttctttggtaaaggcaaagtagatggtttcaattttggtagttttgtcgttgccgtaataggggcaatcgttgtgctttatttagcaaaaatatttgccagttaattggaaataaagagtctattaatactattaaacccgcatctgcgggtttacttttttgtgctaacttcactatcgcttttattttattcgcattcacaaggtaatgcgttttctgctccccactgcgcccaagagccatcatacagtgcgatattctggcagcccaatagagttaaagctaaaaatagaatagccgcagtcatacctgagccacaactgacaataattggctgagataaatcgactcccgcttgttcaaatatgtgctgtaattgcgctttatcttttaattgtccattaatgactaagctatcccaaggaacatttttactattgggaatatggcccctacgtaaaccgggacgaggctctggtgctctaccataaaatctatccgccgaacgagcatcaatgatttgattttgttgcgtagtcagattatccagtatttgttgtttatcgacacggcgttgagtgttgcgtgtgacgataaaagggtgagtggttgggacgttgggcgtttttccttgctcaagggggaaccccgcttcctgccaagcttgtaaaccaccggccagaatacgcaccttgtgacaacctaaggtagtaaaagtccaccagccacgaggtgctgaaaagagattaccgatatcatagaggatcactgttgtattatttgaaatacctaactgagttaaggtttcagaaaacagtgtgtcagatggcaacatatgtggtaatgatgttgttttatcggcgatttcatccagatcaaaaaaatgggcaccagggatatgacgttcaagatagcgctgatgatagtcaatatcttgcgtaggcataggcgcgctaacatcaactatcaccagatcttgatcgtcgtgatgttcaaaaagccattgtggggtaacaaaataatcaaattccatggtgcaacctctttatttcgtcgatggtgagctatctggtagagctggaaattgctgtgctggtgagcgattaggttgagtctgctctgtgtctaccggtgtggttgagcgcgtataaatatttagtccggcaagaaaaacgcctccaagggagccaaaagccagtagtgcgataacaacaagaagtaattttttcataagatttatgtgcagatgaatgttactaaaaagtatatctagatatgccattgaaacaagtgctgtaccacataaagcagtaaattggttagtattaaaataggatatcgctgttcaaaaaacaaacaaatttggaatataataatacctagttttaattatggtgatagttattgtttagggtgatggataataacaaaaagcccttaaactcaggagtcaccgagtttaaggggaagggaatacaacttattattttatttgatacacaatcggtgctgtaaattatgtgtataaaaaccagaatgtcatcgctaagttaacggtagcggcgatagccattggaattgcggttcttttcactatttggaaaggtgagacattggcaattcctgcaatagcaacaatagctgccgtaataggtgaaactgtgcgaccaaagctggtcataatttgcataggtaaaattaaagtgatgacatcgacttttaagaacgcagcaattttgggtgttaatgcggcaaatgaaaagaatgcagcattacccgatcccattaaaaaggctgctaatgctaagatggcactcatcacaataatcatcgcagcaataccaaagccagcatcttgagcagaactaattaaggtatctaccgcgccactttttagtaatccattagcaaaaaattccccagatacaatcaacgatacaactaaaacaaactgttttcccatgccttcaaagaataacataaaactgttcattaccgctttagcatcgcgcaatcgcacatattcaaagactagtgcaataaccgtactaataatcattgcggtagtcacttctaatttaatgtaattatgaaataacggactaaaaccaataatgagaattaaagggatcacgggtaataaggcatatgataatggcacctgacttccttcttcttttacattatcaatagctgttgggtcgaaaacaaaaccctcacgtttatcccaccaacgttgaataaagaaatgggtaatagcaaccgcaatgataataggaatagtgatagggagttggtgttgaacaaaatagactgcaggttcaatatccgctgttttagccgccataataacatttccagagccgggtccatgatcaataaattgacaacaaccgataacagctaaagcagatagaggactaatacctgagcgaattaaaatagggtacatcgttaccatgagtaacattcctaaacctgcatggctaggaataaaaataactaaaatttgtgtgactaaaaatgaaataaccagtaataagtagggggatttaatcgtttttaatggtttttcaaaaatagcaaataaagctcggctggcgcccacgtgttccatataacgtgagaaaccagcaattgccattaaggttaaacctaaacccgctaaacgcgagctcataatatcggtaaaaatttggaaaatatcaaaatacttaaattgtgtagatttattttccggtaataaagggttgagatcgagagaagctgtaaggagcaataacagcatgcctccgagtaataacacaggttgaggtttataacctcgagccagcaaataaactaccaacgcagtaactagcgcggcaataattaaaccagtcataattaattccccagtgtcgtgatgcagtattgttgttattgatttaatgcactaaatgcttgggtgagatctgcaattaagtcatcagtagactcaagaccaatatgtaaacgtacaaaaggaccgtggccttcacgccaatctgttgctgttctggcacccataacattggcgggtaatgcaagactttcaaatcctccccaagatgcaccaataccaaataaggttaatgcatcaataaattgttcagattgtttaatggtatatttttgtttaaattcaatggttaataatccattactacctttacaatcacgtttccataagtcatggcgaggatgtgtgggtaactctggaaaccaaactttggccacttcagggcgtgtttctaaccactgagcgatagccagtgctgatttaccatgatttgtaagacgttgagcaagagtcctcattcctctcaggactaaggcggcatcatcagggctacttgcttgaccaagagcttctggtaatgccccaatttgtttccatgcggtttcatttgcgatcataatgcccatcatgacatctgagtgaccgcataaatatttagttgcagcaattacagaaacatcagcacctaattccaaagggttataaagccatgccgagccccaagtattatccaccccaacaggaatatttttttcatgagcgatatggcaaatttctggtagatccagcatttcataaagtaatgaacccggtgattcaacgaaaataagttgagtgttttcttgaattttttgctcgaaatctgaaccgtcagttttaaaaaagctataagtgatattattaggctctaaaaaagcagaggctattttacgtacgggttcatagacagaatcagcaaataaaacatgcccaccacttcgggcgtagcccataatagtaaatgcaattgcggctagccctgtaggaaagagctgtgctcgataaccaccttctaattcagttactaatgcttcaagtgcaaacgctgtttctgtaccacgagcaccatagcttaatactcgttcagtaatacgacgatcgcgtatttcacgccagctttttattgaatcaaaaacaatagtactggctctcataacaggagggttaattgggccagatgttttaattgcttgacgcccactatgtatcaatgttgtttgtttattctgtttcactatttatatctccgaatatagaaaataagatctcccagtaattaatttagaatttaattactattttgagctggaaatttgtagttgctattatttataacaaagatatttatttttaaaatatctatttttaaaaaatgatgatcttgctctaattttttatcattaattattctaattaaatcttaaagattgtttaagatttaaaaggtataaataataaattaattttattttgcaacttattgaattttaattaattttcaattgattagaaattctttaaattagattaaaattatcaaagtgtttttattaaaattctattgcataaataaagtaacaagctaacaactcgttttattttaaaaacgattttttattattcttttaacaggggaaataattatgggaactagtgtgtttgattctgttttattaaaaaacttatggtcaacagaagaaatgagaactattttttctgacaaaactagaatgcaaaattggcttgattatgaagcagcattagcaatagaacaagctgagcttggtttaattcctcaaaaggcggcggaggttattgtacagagtgcaaaacttgaaaaattagatatggattatgtattagaacaagttcgtcttactcgacatccattagtacctactattcgaggcttagaacatgcttgttctgaacattatggagaatatgttcattttgggccgacaacacaagatgttattgatacaggcttagtgctacaacttaaagctgctcatcaaacttttttacgtgatattaaaatattaggtcgttcattactttctttaagtgaaaaacaccgcaatacacctatggttggacgcactttagcgttacaagcgttaccaatcacatttgggcataaaacagcaatttggttgacagagttagcgcgtcattatcaacgacttaaagaggtggaacctcgtctatttgttggcagtgtagtcggtgctgtcgggactaaagcttctttaagcgataaagctgatgaattagaaaaacgcgtattaaaacgcttaggattagatataccggaaatctcatggcaaccagcacgtgatagatttagtgaatatggtatgttaattggattaattagtggaacgttagggaaaatagctaacgagatcttaatattagcacacaatgaaattgatgagctttcagagccttttggtaaagggcaagttggctcttcaactatgccacataaacgcaatccagctattgttgaaaatgccgcctgtgtaagtaataccttaaaagctaatctttctgtattaacggatatgatgaaacatcaacatgaacgtgatggtgctatctggaagatggagtggaagattatgccagaaatgtgtctgatgttatctgttatcttggataatatgaaaacagtactaggtgggctaaatgttcatgttgaaaaaatgcgtcacaacatggatatcttaggtgggtttatgttagcagaacgtgtgatgtttgctctgtccgataaagcaggcaaacaaactgctcacgaaattgtgtatgaagcgtcaatgtctggacaagaagaggggattactttcgtagaagctattaatcgtgatactcgtattcgtgaccatatttcacaagaagagttaaatgctttgctagatccaactacctatgttggtaatgctcctgagcaagttgatcgtgtagtcgctcaaacaaaagcttccggctggttaaatgattaattgatggaatgaaatctcataaaaagccagtgataactggctttgttattatcagcattgaggtatttatatgacattgagtcagcatgtagctaattttattactacaacgacattttcacagcttccaacgcaactgatagctcgagccaaattacatttattagatacattaggtgtagcacttgcagggagtacacaatctagctcgaaacaaggacgtcatgggattactcttttacccgatagccaaggtaagatccccatttggggaagtatgcagacagctaataccactgcagcagccttagccaatggtattgctgcacatgcattagatttcgatgatacacatactgattctattactcacggtagtgctgtattaacaccgatagcttttgcgttaggggaaacattaaacgcctcaaatgaagaaatattaacggcttgggttattggttgggaagttgctgcacgggttggtttagcgagtcacagtggtttccatcaacgtggatttcatgcaacggcgattgctgggatcttcggtgcaacagcatgtgcggcttcattattaaaacttacgtcacagcaggcggtaaatgcgttaggactaacggcaagtcaagcagcgggtatcgctgaatatctgactaatagctcatcggcaaaatgttttcatgccggatgggccgctcaatccggtattattgcagcctcgttagctaaagggggaatgactgggcctgagacaatatttgaagggcgatacagtatttatcatactcatgggatcagtgagcaagcgatccctgaacaagttgcacaaggattaggtgaacaatgggagtttttaaatgtttcaataaaaccttatccggtttgccattttgctcatgctactgttgattgtggacgtcgtttacttaaaagagggatcagtgcggaagaaattgaacaagtagaatgtgtgattgatccagttgctgctgcattaatttgtgagccactcgaaacaaaatgggcgccaaaaacagcttatggggcaaaatttagcttaccttggttatttgctattggttttttagataatgcgttaactttatcatcgctttcagcggaaaacttacagcgtaacgatatccaactattggcgaaaaaagtgagctatcgttatccatcagaaaatgaaattccctttccgagctattttcctggattaatctttgttagattgaaaaatgggcaacaattaactgaaaggatcgatattcagtatggtaaccctgaaaatccgatggttgatacggatgtaatagcgaagttttatgataatgccaagtgtgtaatgaaaaagacacaagctgatcaactgattgaaaatataatgaattttgaaaatatacctatttcattacttacacaattattacgggtagaggcataactcttttatctgcatccacagggacaagataatgaatctgataccttttgtttaaatgagttgcacctgataaatggcactgacaatttattgtagtgccatttttgtttccttaatgagttagtggttttgaagggtaatatctgcgtgattaatgacttcattctgctcattttttaatgaatcaaatagtatctgagctgctttactcgggctattggcattaagataaaggttataacgaatagcaggtaatggcggtaatccctctttttcacccaaaatacgtaaatcatcatcagaaagctcgatagagcgtgccattatacctaaaccagcacgaacggccgctctggcaccagataaggtggtggcaatataggcaatgcgccagcgaatattttgttgatcaaggtgatttatcatcatatcacggtaagtacttggttcatcaagaaccactaaaggtaacggttcgtcaagatcaaatctaaaatgtttaccgcaataccataacgaaggcgatacgcgtaagacaattttagggtaaccgacatgctcttctgtagaaatggctaaatcgacctcattattttccaacattgacattaaaaaagggctacgtttaacaataatctccataattaaacgaggataagcacctgaaaaacgagcaagtagatcgggtaagattgtgtttgctgtatcatcgggagagccaatctttaatattccatcaatttcttcatgcaataaagataaacatgcttcatcattaatgcgcaaaatccgccgagcataattaagcagttgagtgcctgcttcggttaatgttttatttctcccttgtcgagcaaaaagctctttacctattaatgactcaaggcgttgcatttgttggctgactgcagattgtgttcggcaaactgattcagcggctgcggcaaaggtggaaccatcggcaacagcaacaaaagttctgagtaggtctaactctaaattaaaaatagggcgctttgcagaagtcattttattatctcttaattggtgttgtggtgcgaaataaaacgcaagaggtattatttttataaaggttaataaagttctttttaattggcataccgctctctttcatactatgaagagttggatcaataatctataacaccgctcaataaattcgtagggttacgcagtatttgatgaaaaaggcgagtaagtgcagctgactactgatttttatacagtattatgcgacaataacgcttattttaatgacaaatagagtagttatgtccctttctcaatctgtaaaaatgcaaatcagccaatggtataaagcattacctgagcatattgaaggctttattccacgagcgcctcagcgcgaaatgattgctgaagttgcgaagacattttctgatgaaacggggcgacatctaattattgaagcgcctaccggagtaggtaaaacactctcttatcttattcctggtattgctatcagtcgggaagagaaaaaaccactgattatcagtacggcgaatgtggcgctacaagatcaaatttacagcaaagatctgcctttactaaaaaaaattattccagacctgacttttactggggcttttgggcgaggtcgttatttatgtccccgtaatttagaggcaatttgtgcaacagaaggtgagcaaattgatttaatgttcttgctggaagataaagttgatgtcgcaaccagtgcggaaagggagatttgccaagagttaaagcacgattttaccagctttggttgggatggtttgcgtgatcaccataaacgagcattaacggatagtttatggcgcaagattagcacagataaaatgaattgcttaggtcgtaattgccaatactatcatcgctgtcctttttttctggcccgtcgagaaatagacgaagttgatgtggttatcaccaatcatgctcttgtgatggctgcgatggaaagtgaatcggtgttacctgatgcaaaaaatattttattagtattggatgaagggcatcatattcctgatgttgctagagatgcgcttgaagttgaaggggaaataaccttatcggcattaaatatgcaacttgataatatgactcgtcatgtcagccaatatttagcacaatttatcccagtcaaaccacccaaattagccgatcccattcgttttgatgctcatattgcaaaaatgcgcgaagcctatcaagacgttgaacattttacccgcgcgttattgcctgagcgcagtgaaaatgatgaatatttatttccattaggtcaattacctgaacaattactgttatgttgccaagacttatttaagctaaccgatggtttaaaaatgttaggtgagtcgattcttaacgacttaactgagcgaacagcaaaagaagatgttgtacgtttacatcgcgcgattttaaccactagccgaatggttggttatctggaaaatatggcaaaactatggcgacttgcgacattagagcagacatcaaaagcacccgtttcgaaatggcttactcgtcgttatgataaaaagcagtcacatctctatttacattgtgctggtattcgcgttagtgaacagttaacacaattattatggaaaaatattcctcatgtggtgatcacttctgccacactacgttcattaaacagtttttcgcgtattcaagagcttacaggactaagcgaacactttgatgatcgttttattaccttgtcatcgccttttacacatgaaaggcaagggaaactcgttatccctaaaatgcgttatgaaccgacaatggcgaatgaaaaagcgcatttaaaagagatggcacgctattttcgtcaaggaatggtagaaaaccaccatcgagggcaattagtattatttagtagtcaacgggcgatggaaggttttttagaggaagttaaagatctacgtttgagtctcttagtccaaggagatcaaccgcgctatcgtttagtggagacacattgtaagcgtattgatgcgggcgataatagtgtgttaattgggctacaatcttttgctgaagggttagatttaaaaggtgactatttaacgcaagtacatattcataaaattgcttttccacctgttactgatccggtcattgtgacggaaggggaatggctaaaatcactgaaacgttatccttttgaagtgcaaagtttaccaagtgcatcatttaatttgatccagcaagttgggcgtcttattcgtagtcatcattgtcatggtgaagttgttatttatgatagacgtttattaacgaaaaactacggctcacggctattaaccgcgctacctgtctttcctatttatcagccagatatacctaaaacagaataataaaaaggctacctatattggtagcccttttcagtaagaagcatgtgattaagtaagcaattagttttcaatatttgcttcaataaaccataagaatttatctagatcacgggatgctgcggtaaacatatcagcagtatcttcatcttcaacttcatcaatcgctttacgaatatcattagcgactaccgcatagcgatcagccaatgctttaaggtgatcttgcacatcatgaatatcgagtggataggcttttaaaggtgtttttttactgacagtttgtggtgtaccaaggactgtgccacctaattgtactaaacgctcagcaaactcatcagtatgttcattgatggtatcacggaaaccatctaccatttcgtgtacggcaataaagtttctaccgcgcatattccagtgtgcttgtttggtaatgagagacaaatcgataaactgagtcaccatttgctgcagtagttcgatagtatgcagtttaacactgtcatcaacattattacgggtataaagcagggctgaaggtgtggatttgactaatttagcagtactcataatcgttctccctaaataattaataactcaatatcttaatttctgttaattatgatagtggattattaatggttagtcttatcgcttgctactattaaattgatagggcattactaataaaaatgtcatctatcgaaatagcctatttagaataagacaatatgcttaaaatagcaatgttagggaagtaaagttattatttaataagtaaaaagagatcaactgatctcttttcatttaatattttatttattaataagttaaactgtataaatatttattctactttttcaattttggtttttcttttcatggttgcagtggaaccaatcgacgctaacacaataaatgccaacgcaacccattgtattaacgttaaatgttcatgtaagaaaataataccaataaaagcccccatacaaggctctaaactcatcaatgtcccaaaggtttttgccggtaaacgggtaagtgcaatcatttccaaagtataaggaaaagcggtagataaaatcgcaatagctaatccaataggtaatatagaccaactaaaaactagctcagggctactttgtagcataccaatagggaaaaagataaaggcggcaataagtgagccaatagaaactgtcgctgcgccatagccttttcctgcacgttgtccgaaaacaatatacagtgcccaaccgacacccgcacctaatgcatataaaatgcctaggggatcgagtccgtgaatattatccccaatcggcagtaataaccctaatccagcaatcactaagattatccataaaaaatcgattgctctgcgtgaagaaaacatcgctaccgcaagcggtcccgtaaactcaagtgctactgcaatacctaatggaatagtttcaagagccaagtagaataagtagttcattgcccctaatgataaaccatataaaaatagtggcattatggcactacgagaaaagcttagacgccatggtttaaaaataaaaaacaggatcagagtacctagaaaaaggcgtaatgctgtgactgcgggggcgccaataacaggaaacaggctttttgccaatgatgcgccactttgtattgatagcatagaaagaagcaaaagaagcacagggtagaacacctgtaatttagctgagtgtctggctgacaacatcctgaaaaacctcgtcaaaagtaaagcgttgagtactctgttatcctatataacaaaggatcacataatataaagtaaatttgtgatttttaatatagttatttattaattatttattaataacacaacttaaattattttagtttagggatagtttaataatattaaaatatatttggaaaatacagtaaggatgaataaaaacaatcaaattaaatgtgtattattaataaaacaaacagagagatatattataaaagcgataaaataattttttttgaccttttttataactgaggggttcagtataatttttcactcgttttaactagctaaagagaattaaaaatgaataaaataaagtctattgccgtgtattgtggttcaagtttaggcgcttcaccaatttataaacaacaagcgattctttttgctaaagagctggttaaacgtaatatcactttagtttatggtggtgccagtgtaggaattatgggcacgctcgcggataccgttttacaggaagggggtaaagttattggtgtgatcccaacgctattagaagggcgtgaaatctcacataaaaatctgacagaactccatgtcgttgaaactatgcaccaacgtaaaagtaaaatgattgaactcgcggacggctttgtggcactgccggggggttttggcacattagaagagttcagtgaagtgtttacttggagccaaataggccttcatcaaaagccattaggtatatttaatattaatgatttttatcagccattactggctatgatagataaaatggtagatgaaaaattcttacatgaaaaatatcgtcatatggcgattgttgagcaatcacctatccagttattagataaatttgaaagttatattgccccttcgattaaaacctacgataaataaaggtagagcatgataaccataagaaaagctgtactttctgatgttgagcagattaataccctgtatggctatttatttgctgagatggcgaaattacagccagaaagattaaaaccgggtaaacaagatgaagcatttattattaatggcattaaaaatgataaatttcatctgttagtggctgagttagaacagaaaattgtcggttttactattgcccaaatacaagagacaccgctatttaactgtttagtacagcgtaaatatgcctatatttttgatattgttgttgacccttctgttcgtggacaaggggcaggggcattgttgctaaatgccatgaaggcgtgggctaaacaacaaaaaatgacccacctagagctttcagtattggctgaaaatgccgatgctaaacgtttttatcagcgagaagggttaaaagaagtcagtaccgtgatgggtattgctttgtaattttcgcttaatcatggcaaaaataaacccgctgagtgcgggtttattaattatgttattcagctaaattgtgggtttccccgcaattatcgtacacaataccctgacattttcaatatcttctgccgatatttcaaacaagtttctatctaagacaataaaatcggcgaatttccctacttctaatgaaccaatctgtttatccatatctagtgcataagcggcattaatggtggcggctcgtaatacttcgattaaggtgagattgcgatcattatctaaacgtggctgagagggatctttttgtcgagtcatggcaactttaaagtcataccactcatttaatggatcaatcggccaatcactgccaaatgcgacagtcactcccgcatcaataaatttaccggcggtttctagatattggcaacgtgctttgcctaacatttcaagatctttatcaatattatgttgctctacgccagcccattgaaaggagagaaaagggtaggtatttaattgggcaaagcgcgcataatctttttcacacattaattcgttatgcgcaaggccggggcgaatatctttttctggcaaggctttgcgcatttcactaatggcgtcaagtgcgacactaatagccccttcagcgacggtatgaatatgaggatgataacctgcacggctaatctcagtgactaatggcgtcaagatttcaggtgaaaaatagagatcgccaacatgctctgaatcttgccaatgaggcgtttcatccgtaccgacattaatacgataaggagcgtgtaaacgtgctgtcataatcggcgcttgtaatacaccatcaagaaaaagcttaatatggcgaatagcgacactgggttgcgcgccttgactgatttgatgccagtgagagaatcgtgttattgcttgttgtacagcatgaggaatagctgcaatatcagccacatcatcaggggtaatttcaaccgcattctcaacacgaaccgttaattcacccgcttctcgcaaggtattaaaggcacgtaattgtggctcaccaacacgtgcatccatgatagtcgttaccccttgttgattgagcaacttttgtacatggcgtgcgatttgtagattttgctctgccgttaaaggcggtaggctatcaatagcctgcatagctggcgcatcttcaagaataccaataggtgttctatcaccatcacgttcaatattgccatcaggtggatcgggggtttcagccgtaatatttaataattctagtgcgcgggaatttgctaatacgctatgacaatcactagaaaaaagtaagatagggcgagacgtatttaagctatcaaggtgataacgcgtcatttgtatcccttccggttgcatcccttcacgataccatgctgacactttcaaccaagctgtatcactatcgatgggatcagcatcaagatagcgttggatacgcgatagaatttcatcgattgttaaggagaggtaatcaaggtgacaacctgctaatgtggctcccccccaaaatggatgcatatgagcatcaataatgccgggcatcaccattttcttctgtaaatcgatatgctgtgttttttcattacagtaagcaagtaaattcgattttgtgcctgttgcaataataatgccttgggaaacagcgatagcttcgacgaaattgttactattatcagcggtatagattaggccgttataatagagtgtgtctgcaatttgaaatgtcattcttctaccttgtatagcttttttggcgatgatggctaattttcggtactgattgggcatcctatgaagttttgatgcgggcggtcatattagaattaaatgacgctcaatactacctgcgtgttacattgatttaactaactgttttatcaacgggcgaaaataataggataaaccgtatagaataccactatatggaagagaataaggtaagcagaaccgatagctacttaccctattaaaatattagaaggggtcaattatcgggcaaattagccgcacatacatcacagtgtggatttttaggtagcttaaattcacgaaattgcatccgcatagcgtcaaaaattaatactttgccatgtaaagtttcgccataaccagtgagtaatttgatggcttcaatggcctgtaaagtgccaatagtacccacaacaggggccataatacccgcttcaacacaagtgagtgcattatcaccaaaaagatgacttaaacagcgatagcaaggttcatcatcttgataggtaaagacgctaatttggccttccatacgaattgctgcaccagatactaagggttttttctgcacaaaacacagtcgatttagttgttcgcggatagtgacattatctgtgcaatccattaccagatgatgttggctgattaattcagccagtgctttatcttcaagtagtgcatcaaccgtatctatctgtacatggggattaatcgcgtttaatgttgttttagctgataaaactttcggctgaccaatggtgctatcgcgatgcaggatctggcgttgaagattggacagtgaaacggtatcaaaatctaatagtgtcagtttgccaacacctgcggcagtgagatattgcgatacactacagcctaatcccccaacaccgacaatcaatacagaagcacttttcagtgcttcttgaccgtcaaaatcaaagcctcttaacacaatttggcgattataacgcagcgtttcttcatcggttaattctatactcataaacactattcgctttttagcagaggattaaatagctcaatagtgacggtttcacccgctacaactttaccacgctctcgctctaagacgataaaacagtttgcaacactaaaggagctatatacgtgagagccttgatgtcccgacgttgttacttgccattcaccattttcattaatactggcgataccgcgttggaaatccagacgaccggcagatttttttaatggtgaacaggttttagcatggaaacgctgtggtgctcgccactgactaaaaccagataaacgggcaattaaaggctgtactaattggtagaatgtcactgttgctgagacaggattacccggtaatccgcagaaccaagcattatgtaagcgaccaaaagcaaaaggtttacctggcttaatggctaatttccaaaaaccaatttcgcctatttcatctaaaatttgtttagtatagtccgcttcacccacagaaactccgccactgctaatcactaaatccgcttgtgcatcagcggttttaaaagtttctcgcagtttttctggcgaatctggaataacgcctaaatcaagcacatcacaatctaatttttccaacattaagcgtacggcaaagcggttagtatcatagatttgccccgcttttaatggttggccaatagtttgcaactcatcacccgttgaaaatacggccacttttaatttgcggtaaacattaatattggcaataccgagtgaagcaataagaggtaactgtgctgtagaaagttttgttcctgcggctaagacgatatcgttttgttttatatcctcaccaatacgacgaatattttgtccaagcttggccggatgtggaaaaagaataccgttgtcagtcacttgtgtttcttcttgcataataacggtatcgacacctgcgggtatcatggctccggtcatgatacgaacacattgtccttgtggtaattcaccttcaaaagggactccagcaaacgctttgcctgcaataggtaaaggagattgagtgtttagatccgtataacgtacaccgtaaccatccatggcagaattatcgaaaggaggtacattgagtggtgaagtgatgtgctcacttaagatataacctgctgccttatgcaaagggatactaagggtatctgtgattgccaccggtttttcaagtaatttttctagcgcctcatcaagggataacaaaccgctaacctgacattgactcattgtatactccaaaatctatcgaaatgtgctgttttatttcatgatactaatctatcacgatgaagcacatcatgttagcgatcatctcatcagcaaaaaaagaaaatattactcaacacaaaatgttaactatttaaaacaaaactgttagttaatgtgttaataatattgttgtattttaaatgtaataaataacatcaatacaatggagccttatgaatacctcaacccacccaagccattcagcacaagcctttcatatcgcttttagtggtttccttgctttagttgttgctatggggatagggcgttttacttttacgcctcaagtaccgctaatgattgcggacacacaactgacattaaccagtgccagtattgttgctgcatttaattatctaggatatttagctggttcatatgatgcgatgaaagcaactaaaggtgtgggctatcggctttgggggggattatggggagcggtgatcattacactgcttagtgcggtacttaatgatgctttaactcatagtattgcccgtttttttattggttgggcaagcggttggacattagtgcttgttgcttcgtgggcaaatgaagtattagcccgtttaaatcgcccggcattaagtgtggcagtctatgcaggaacaggggcggggatctttattagtggccttcttgcggtattcattctcaagtggcagatgagtgcgacaacaggttggttgatttacggtgtgttggcatttatttgtgcaatttatgtgagctatcatttacccaagccttggtcaattaatcgtgagcaagtcaaagtagagccacttatcttaacgccggcgatgaaaaaattgatttggggttatacctttgcgggctttggttatattttacctgcgacctttttatctcaaatggcgacagaacgttttcccggtagcttagtagctcaatttgtctggcctatttttggtgcttccgcagctttatgtattgggatcgcgatactgacacgtaatgtccttaatacacaattacgattggcgataacactatggttgcaagcactggggatcatcattgccgaatggctacccacaattacaggtcttgctattggcgcatttttagtggggggagggttaatgtgtgcggtgcaattggcatttttacgtggtaaagagttggcacctgatcatgctcgttatatggcaggattattaacaacattttatgctattggacagctagttgggcctctggtttccttcctttcaacggcgttaacgggaagactagagccggcattatatgtcgcctttgtgatattgatcatcggcggtattttggtttgtatgaaagaaaacaataaagggtaaaacaataaaaaatgacaaaaaagcaataatttcataaccaaaaatgcagtattgctggataatgtgattcagctcatctaaagtgtaacggttatcgttgaattaggtaacagagacttaattaatgtgtttatcggagagtccaatgtcatcaacattaagtaaagaggcgcaatgggtacatgccgcgttagtggagcgtggtttggaaacgcctcttcgtgagccaaaactttcacccagtgagagtaaacaacaaattaaacatcacatgacggaagtgatgaaattgttaaacctagatttgagtgatgacagtttagcggaaacgccacatcgcattgcgaaaatgtatgttgatgaaattttttcaggcttggattatcacaactttcctaaaatcaccctgattgaaaataaaatgcaggttgatgaaatggtcactgttcgtgacatcacattaaccagtacttgtgagcaccattttgtcactattgatggtaaagcaacggttgcttatattcctaaagataaagtgattggtttatcaaaaattaaccgtattgtgcagttcttcgcacaacgccctcaagtgcaagagcgtttaacgcaacaaatattgattgccttacaaacgctattggggacgaaaaacgttgctgtctctattgatgccgttcactattgtgtaaaagcaagaggcattcgtgatgcaaccagtgcaaccaccacaacttcattaggtggactatttaaatctagccaaaatactcgccaagagtttttgcgtgctgtacgccatctttgagatgaataaatggaacaaagttcacgtcaacgcatcgacgctttagatgcgttgagaggaatagcgatccttggcatcttattactcaatatctcaggttttgccttattaagagttgcctcatttaatcctatgcattcaggagaggcgacttttgtggacaaacttacttggatggggctaaatttatttacccaaggaaagtttctgtttatttttgcgctgttatttggcggaacactttatttattatcacagcgctctgttgcttggaacgtctctcgcctaattattctggcattaatcggtattattcataccctattactatgggaaggggatatcttatttccttatagtatttgcggattatttgttctcttttttattaaagcattacctattaagcggcaatttatccttgggctgctgctctatttatttggcgcgattattttagcttttttattttattactatcgtgattttgttgaaatagtttggtatagctctgactattccgccatgatagagactaattggaaaaccggaaactatataaatagtatctactggcgattagatgaactgagtgattttatttttaatttagttcgtcaatatagttggtttttaattggcgccatgttaatgggggcggcgttaatggcatccggttggttacaacgacgctattcacagtctcattatggtttgatagcggtttgttttttagtcataagtttacttttccaagggacgcttgtaattaccgattattatttagattggcattatatgtggtctgcggtagtggctcagcctatcaccatggtgatccaaattattcaaagcttaggttatattgctttactctattgggcatggccttatattcaacacagttttatcgcctatgctttacgttgtgtgggaaaaatggcgcttaccacctatttactacagagtattattggcacgacgcttttccagcggatggggttatttaaccaatttaccttattgcagcttatgctatttgtgatggctatttgggtgataaatattatctttgccgtaacgtggttacgctatttttctcaagggccaatcgagtggctgtggcgccactcgtcaacagggttatcaaaacgcttttaactgtttttgccattgtttaatggcaaagcttctacctcttgtggtgaaaccgccggatagcccttaatatcatcaggaatattttgtacagcaggtatggcttctggtggacctagaaaacgcggttcacgttttaatatatagagatcgacaaccgcacctgctctggctaaaacttcacgtacacgcaccttaaacatactcttcggcgaagcaacagcaaaacactgagcatcaatgcctttttcaagggcaataaatacggctcgttcgcaatggaaacgctgagtgataatagtaaagccatctgtcccaaacacttcttttgtgcgtactaccgaatctaaagttctaaatccagcaaaatccataacgatacgcgatgccggtatgcctgctttaattaaatctttacgcatcgtattgggttcattatagctatgctgtgcattatctccactgagtaacagatattgcactttgccgctgttataggcgttaacagcaccttgaatacgatattgataaaattggttaagatagcctgtggtgtaatatttagcagtacctaataccatgcctacttttttggcgggtagtttatctatatcttcaaatatataggggctagtttttacacctatccagcgatcacaagcaattaatgccaccgcaactaagataaaaagggtcaaaaagagataaatgaggcgctttagcatatccttgccttaatgactcagggttttctaataggttaaaggctacttgagcactaattgggaagcaagaaaaaagcgcgctattagtgataatagtgcgcttttcagaatgaaacctaatgattttaactcaattagaatgacgttctcttgtaaatacggtattcaggctcccaatagttacgttcaatcgcttcttctaaagcagaatcagacgtgaccgttgcaacaccttgcacctgtgcttctttggcaacttgtttagcaatataacgtgaaacttgttgaatatcggctaataaaggtaatagtgggccatcgccttcttttgccataggcgagcaatcggctaacgcacggcttgcaaccattaacatggcatcagtaacacgctttgcaccacttgcaataacgccaaggccaatacctgggaagatgtatgagttattgcattgtgcaataggatacactttttctttataggtgactggggcaaatggacttcctgtagcaacaagagcttgtccatcagtccaattaataatatcttcaggacgcgcttcaacacgagacgttgggttcgaaagaggcatcacggtaggacgttcacaatgcttatgcatttcacgaataatctcttcagtgaaaagtcctgcttgaccagaaacgccaatcagaatggttggcttagcatttttaaccacttctaacagtgaaattgcatccgtttctgtttgccaatcggccagcgtttcgcttttttgaataagcttgctttggaaatcgagtaagtttggcagtttatccgttaacaaaccaaaacggtcaaccataaagatacgtgcacgagcttgttcgtcgcttagtccttcagacttcatttgtgcaataatttgctctgcaataccacaaccggctgagcctgcacctaagaaagcgacagtttgatcttttaattgacgccccgcagcacgacttgccgcaattagactacctaatgtcacagcggcagtaccttgaatatcatcattaaagcaacataattcatcacgataacgatttaataacggcatggcatttttttgtgcaaaatcttcaaattgcagcagtacatttggccaacgacgtttaacggcttgaataaattcatcgacaaattcgttatattcatctccggtaatacgtgggtggcgccagcccatataaagtgggtcatttaaacgttgtggattattggtgccaacatccagtacaacgggtaaggtataagcggggcttattccaccacaagcggtatataaagagagtttaccaataggaatacccataccaccgataccttggtcacctaaaccaaggatacgctcaccatctgtgaccacaatcacttttacgttttgtttggtggcgttttgtagcatatcatcaatattggcgcggttagggtaagagataaaaagtccacgcgcacggcggtaaatatcagagaagtgctcacaagcttcacctactgtgggggtataaatgatgggcatcatttcagtaaggtgagattccaacagacgataaaatagcgtttcattggtatcttggatatttcttaaatagatgtgtttatcgttatcatttttaaaatcaagatattgacggtaagcgcgttccacctgctcttcaatggtttctactgcctcaggcagtaaaccatgaaggttaaaggtgctgcgctcttcttcgctaaaagcactacctttatttaacaggggaaattcaagcaggattgggcctgcatacgggatatagagaggacgtttactttcgtgttccagttccatgaaaaatactcttgtaaggcagttagtcacatgacaagtgtagatcctacaaaataataaaaatatgtacagcttatgttatttttttatgatttttctgcttagaaatgagagatagatacaattgttatgactttttctgataagcatcagcaaaaatttacatgctgatgcttttttatgaggacaatttaacggtataagttaaaaaatgttacaaagtgacacgctgtatttggcggcaacctaaagctgttaatgttgcttgtgtggcatcccactgagttaataggctgtctgctttttcaattaatattgcagactcaatatccataacattttcacccgccatatttaatgcaataagtgccgcttgtaatggtggcatactaggattgaatgcggcattttcagcataactgccttgaaagatcttaccgcttttcatctgtacagcaataccactgtgagaatggctgtaaggggcatgactacgatttattgcttgtagtgcctgttgtgccagttggctagtgttatctatttgataaccgtgattaactttatccatcagtagggtagtgatattgagatctttagggccaaagctatcaggtaagtagtcacctaaggttgccacttttcggcctgggagatggattgcaatatgagtgccgctatttagttcgttcataaactgacgacaatgaccacaaggggtatagttaactgtgatggcaactaaacgagactcaccgcgtaaccaagcatgtgtaaccgcactttgctctgcgtgtaccgtttgttgtaatggggcgccagcaaactccatatttgccccaaaatagaagtgaccgctttcaccacgagcaatggcacccacattaaaatgagagataggtgtcacagcacaagcggctgcaacaggcagtaatgcgagggctaactcatcatcattacattgtaactgtgtttttaacgcattaacttgttctgcagtgaacattgccggaaattcatcctgctcaagataaggcgtaagtgcttgttgtaattgaggggataaatctgaccaaattgcctgaaaacgagtatgcatataggtgtctcccattaatcttctgctattgtaagattttaggcatctttacctattcttatatgtgattaaaatcatattttcaatgaaactattgcaactgaatgattaattgggagatacatctcaaatttatagtaaattgattttagcattagcataaaaaaccttcgctctgaacgaaggttttttatgtgttctattgatttagctaattagctaattagctaaaaaggtgcaaaataaaaggaaaaataaaaggtgcggtaagtgaagtaataataccgcaagtcattaatgctaatgaactatatgccccttcaatataatcgatttcagccgctcttgcggtacccactgcgtgagagacggttcccatcgctaaaccacgagaagcgtgagttggaatacgtaatattttaaatagcgtatgaccaaaaatggcacctaaaatacctactgcaataacacatgcagcactgattgcaggaataccacctatggaatccgcaacagccattgcgataggggttgttaccgatttaggcaaaatggaggcggcaatttcaggagtagcgccagcccataatgcaatcgctgtaccactagccatggcggcgatactaccaataaagcagatactaattaacgatttccattgtgcgcgtatttggtgtaattgttgatataaaggaatagctaaagcaacaacagctggttgcaacaagtcgttaaggatacgacttccggcaaaataatcctcataagcggtgtgtgtcactaataaaataggaataataacaacaatagcaatcaataacggatttaaaataggccatttaaatcgagccgccagtttacgtgctaagtagaaaataataagtgttagcggtaatgaccaccaaatattcattaatattaacattttttcttctcacttaacgctctgtcgtcgtcttgttgttctgctaattctacatcctctactttatcgggtttagcaccgataataggacgttcacgatgcacgtaatgtgagcagtaagcaactagcgccatcaccgcaaaggtactgacaacacaggccagaacaataggaaagagttgttggcttaataaattataatagttcattacacccaccccgataggaataaagagcaatgacatatttttcagtaaaatattaccaccgggttttacccaacgtaatggaataagctggaaggcaagtaaaccaaatagaataagtagtccaacaatactgcctggcaccgcgaaaggtaataaggctgaaataagattaccggcaaaaagacaaagataaagtataaaaaatgatcgtatatagtgccagattgtgatctgcacccgcttagatttcatagatatgtgtcctaaatcaactgacgtatttatcatacaccaattttcaaagtgtgctatggatcacaataaaaaaagagcggggctctttatagaaccccgctttgtatttgcattttgaataaaggtcagtttttatttcacttggtgacccggtttagccccactatctgggctaagtaagaaaatatcttcaccaccagggcctgcggccatcaccataccttctgaaattccaaaacgcattttgcgaggtgctaggtttgcaaccataacagttaagcgaccttctaatactttcggatcagggtatgcagaacgaatgccggagaatacttggcgtgtttctccccctaagtccagtattaattttagcaacttatctgagccgtcaacgaaatcagcctgtttaatttcagcaatgcgcatatcaattttggcaaaatcatcaaatttaatagtttcttgaataggcgcgtctgctaatggacccgtgatttctttgactggcgcaatggtactttttgaagcttctaccattgcattggctttatccatttcaatacgattaaacaatgctttaaatttagtaatttcatggtttaacagcggttgcgacagagcattccaagttaattcagtttgtaagaaggcttctgaacgttctgttaaagaaggtagaattggttttaaataagtcatcagtacacggaataagttaattcccatagtacaaatagcttgcaactcagcctctttaccttcttgtttagcaaccacccaaggcgctttttcatcaatatagcggttagcttcgtctgctaatgccataatttcacgaatggctttaccaaattcacggttttcaaaacattgtgcgatgctttcttgcatatcgacgaaatgttgatataacttcgcatcatcaaggtttgccgctaatttgccatcaaagcgtttactgataaaacccgcagtacgggacgcgaggttaaccaccttgttgacgatatcgctgtttacacgctgtacaaagtcttctaagtttaggtcaatatcatcaatacgtgatgaaagttttgctgcatagtaatagcgtaggcaatcagcatcaaagtgatcaagataggctcgtgccgtaataaaggtgccgcgagattttgacatcttcgcaccattgacggtgacatagccatgcacaaataggttggttggtttacggtattcactaccttctaacactgccggccagaataagctgtggaaataaacgatatctttaccgataaaatggtataagtcagttttgctctctttgttccagaactcatcaaagcttaaatcaccacgcttttcacataggtttaagaatgagcccatataaccaataggggcgtctaaccaaacatagaaatatttacccggcgcatcagggatttcaaaaccgaaataaggggcgtcacgggtgatatcccactgttgcagaccgctgtcaaaccactcttgcatcttattggctacttgctcttgcaatgcaccggagcggatccactcttgcaacatattgctaaaggctgggagatcaaagaaatagtgttcggtttcacgcattaccggcgttgaacccgataccacagagcgaggattaattaattctgtcgggctataagttgacccacatacttcacagttatcaccatattgatcgggcgctttacacttagggcaagtccctttaacaaaacgatcaggcaagaacatgcctttttcttcatcataaagttgagaaatcgttttacttttaatatgaccattttttttcagggctagataaattttcgtcgataattgacgattttcttcactgtgtgtggagtgataattatcgtagctgatattaaaaccggcaaaatcctgttgatgctctttgctcatctcttcaatcatggcttctggggtaatacccaattgttgagctttcagcataataggcgtgccgtgagcatcatcagcgcagatgaaatgaacttctttgccgcgcattcgttggtaacggacccagatatcagcctgaatgtgttcaaggatatgaccgagatgaattgaaccgttagcataaggtaacgcgcaggttaccaataatttattcgcgacgtgagacatagtaaggatcttacttccattaaattaaaaaaagggtctttgatgttaacctatccgtcatgatgtcgctagggcaatcatagagtttttgcaagagaaatttcgcttggcaaattgaggtaaggcattatcgtagtcattgactatctgatatgataggtgcactcagatatttaatgaataacgaaaatgagaggagccgggatgagtgataaatcccccgagcagactacccctgagattctgaaagaaaaagtttcaggtgtcttgtctacttttgaacacccgacattgaaacgtaatctgctttccctaaaagcattacatcagtgtgcgatgattgatgatgtccttcatatcgaattagtgatgccgtttgtgtggaaaaaacctttccaacaactgattgaagaaaaaacggcagagctgcgtaatatgacgggagccaaagctgttgagtggaagctaaaacacaatattgccacactacgtcgtgcaaacgatctaccaggtattaatggcgtacgtaatattctggcggtgagttcaggtaaaggcggggtgggtaaatccagtaccgcggtaaaccttgctttagcgctagcacaagaaggggctaaagttggtattctggatgcggatatttatggtccatccattcctaatatgttaggtacaaccatggaacgcccaacttcaccagatgggcaacatatggcacctattatggcgtatggtctagcatctaactctatcggttatttagtcacagacgataatgccatggtatggcgtggtccaatggcaagcaaagcgttgatgcaaatgctgcaagatacgttatggcctgatttagactaccttgtgatcgatatgccaccaggaacgggtgatattcaattgaccttatcacaaaatattccggtgactggcgccgttgttgttacaacaccacaagatattgcgctggtggatgcgatgaaaggcattgtcatgttcaaaaaagtcaatgtacccgtattaggtattattgagaatatgagtgcgcatatttgtagcaattgtggtcatcttgagcctatttttggtactggtggtgctgagaaattagccgaaaaatatcattgccaattattgggtcaaattccactgcatatctctttacgtgaagatttagatcgcggacaaccgacggtgatgcgtgatcctgaaggtgaattcgctgatatctatcgtgaaattgcttcaacagtttctgcgcaaatgtattgggatggggatgctattccaacggaaatttctttccgcgcggtataagcggtgaaacaataatctattgattattatgggaagtcttttaggcttccttttttttatccgctgaaatctgactatttttgataaaaaacaaagagatttttggttttacgctggaaccagaaggatttcaaaactataatctgcgcgagcgtaatatttacatattattacgttattcctcttttttatttcaaaccaggttttttattatggctgacacagcacatcagtgcacaattgtaggtatcgctggagcctctgcttcaggtaaaagtcttattgccagtacactttaccgtgaattaagagcgcaagtaggtgatcataatatcggtgtgataccagaagattgctattatcgtgaccaaagtgatttaacaatggaagagcgatataaagttaactacgaccaccccaattcgatggatcacgcacttttataccaacacttgtgtgaactaaaagccggaaacgccatcgaactccctcaatatgattatgtcgctcacacccgtaaatcagaaaccattcattttaaaccaaaaaaagttattattattgaaggtattctgttattaacagataaacgcttacgtgaagagatggatttttctatctttgtcgatacgccattagatatctgtctaatgcgtagaattaaacgtgatgtgaatgaacgtgggcgtagtctagattctgttattgaacaatataataaaactgttcgtccgatgttcttccagtttattgagccttctaaacaatatgccgatattattgtgcctagagggggaaaaaaccgtgttgcgatcgatattttgaaagcaaaaatcggacagttttgtgaataattgagttcatttgtaggcagctttcatgcatgattaaccatgaaactgcctgtttaacttgaagaagggaaataaaatgcgattatgcgaccgtgatattattcagtggcttgatgaaggtaaattagtcattgaaccccgcccgcctgtcgagcgaattaacggcgcaacagcggatgttcgcttgggtaaccagtttcgtgttttccaaggacatactgcggcttacattgacctcagtggccccaaaaatgaagttaatgaggcccttgagcgggtgatgagtgatgaaattgtattaccagaaggcgaagcgttttatcttcatcccggagagcttgccttggcggttacattagagtctgtcacattaccggataatgtagtagggtggttagatggacgctcatctttagcgcgattaggattaatggtacacgtcacggctcaccgaattgatccgggttggcatggacacatcgtattagaattttttaattcaggtaaactgccattagcattaagaccgggtatggtgattggcgcattaagttttgaacctatgtcaggctctgcggataggccttacaatcgtcgccaagatgcgaaatataaaaatcaacaaggtgcggtaggaagtcggattagcgaagattaattttcattaacgactattatcaactttattaagcgggtaacaatatgaaaaggtttttgacaacactcgccattttgcttgtagtgattttggcaggcttaacgacattagttttgctcattaaccctaatgattttcgtggttatcttgttgaacgcgttgaaaaacaaagtggctataaattaaccttacaagatgatatgcgttggcatgtctggccaaaactcagcattattagtggtaaaatgtcattaacagcccccggtgctgagcaaccattgatcactgctgataatatgcgtcttgatgtggaattatggccattactttcccaccagttggaagtaaaagaagtgatgctaaaaggcgcagtggttagacaaacgcctgagagtaaagcaatacctaaaataaccccgccttctgttgccaatgaagacagtactcgtccgatcattgagccaaaaacaaatcgttggcaattaaatattgctaaggtgaggatctccgatagtttgattatttggcaaaccaaagggggagagcaacttaatttacgcgatatcaatttattattaaaaacggacgacaaaaaacaaattaaccttgagatgagcaccaaaattaatcgtgatcgtcgcgagttaatgttaaatgttgttgctaatgctgatatgagtggctacccatatcaaatcagtggcaatatcgctcaattagattatgcattatcgggaatagggcttccggctcaagggatctccggaaatttaacctcagatttcaatattaaaaatgatagtgtaaatgttattgccttaaataatttaaatatgacggcaaatgagagtcagttacaaggtagcatcacggctgaattggctaaaaagaaccgctatcaagtggaattaactggggacactttaaatttaaataccctattacctgagttagcacagcctaattcatctgaaacggcatcgttaaccttggcaaataccccgtcgagatcattctcattctttagccatgctcaggctgcaccatcacccaatgcaactattatggctcgtccggttattacctccgcgacaattgaaaacaaagcgtatgatttaacccactggggtgatattgaatttagcttaaacttagcgctcaataagttattgtataaagaattagaaataaacaatgttaaattaaccgcattaaataaccccaaatcattaaatattgataggttagaagggcagatcctaaacggaaatttctcactgcctacggtgatttctactagcattgtgccagcgcatattagtatgaatgtcacaatgaataatatccctttgcaacctttattacgcgtctttgatcagccagaaaatttcagcggtttaatttctgctaaagggcatctagaaggtgccggatataatcgcaacgcgtttcttaatagttggcagggtacactggatacgtcattaagcgaatttaaaatgctaggattaaatattccacaagtgatccagcaatctattgcacaaacaaccgatcaagtggtttatcctgaagatattgagaactataccaaagccgatagtgtgattgcccagtttaaactagcgcctaaaggccgagtgacgttaaatcagttagatgctcaagcaagtgcttatcagatcagcgggcaaggtcaattagatctacaacgtcataatctagatgtgatgctgatggttaatatcaaaaaaggttggggtaaagagaatgaatttattcgccaactagccaaaatagatattccattaagattgtatggtaattggaatgctatccaatatgagtttaacgttgaaaaattactacgtgatcaattacagcaaaaagcaaaacaggccatagataattggttaaataagcaagatgatagccccgaagttaaagcgcttaatcaattattgaaaaaaatataatttttaaagttgttaacaaggtggaataactttttattccaccttgttttgtttttggctaataaattgattttattaatttatgattaataatctcttctcttatattaaacaatatctgtggaacacagatgctgcattacgtttcttatccccgttcccggttccctaccaccgttaacagaaaatggataaaatgattaaattatgctcatagtgcattatgtttatcatttaattcagtttttgcctaaaaaatactcattcgtactgtttacatgtaaaaaaatagtcgttttttttgatatatgtcatacactgcaacgttgcctttgggcagagtgtgtccattgcactaaatgcaaaaaaatgatgataaaaacaaaaagcttcattttataaataactatcgtagacaggaactatacatgattgaaattcttatcggcgccctcgtcgctgtgggtgttgggcgttacattgttaagggatattcgccaacaggtgtgctacttactggtgggctattattgcttatcatcagtgtgattatgggcaaatcagtattaccagccagtgtcacaagtaccggttatcgcttaatcgatattgttgagtatgtaaaaaatctacttatgagccgtggtggtgatctggggatgatgatcatggtgctatgtgggtttgcttcttatatgactcatattggtgccaatgacgtggtcgtgaaacttgcctcacgcccattaaaaatgatcaactcaccttatcttttaatggtagcggcttatattgttgcatgtttaatgtcattagctgtttcatccgcaacaggtcttggtgtgttattgatggcgaccttattcccagtgatggtcaatatgggaattagtcgtggtgcggcggcagctatctgtgcttcacctgcatcaattattttagcgccaacctctggtgacgtgattttagcggcacaagcttctgaaatgccacttattgattttgcgtttaaaacaacactgcctatctctattgccgcaattcttgggatgtgtattgctcactttttctggcaacgttatcttgatcgtaaagagcatatcgaaacagagatgttagatgtgaacgaaatcaaaactcacgcccctaatttctatgcgattttacctttcacacctattattggtgtattagtttttgatggtaaatggttaccagagcttcatattgttgccattattattctttgcatgatgttatctgcggttattgaatttatccgtagctttagtgctaaagaggtttttgccggtttagaagttgcttaccgtggtatggctgatgcatttgcccaagtggtaatgttattagttgccgcaggggtttttgcgcaaggtttaacaacggttggctttattcacgcgttaattgatggtgcacaatcattaggctcaggggcgattgttatgatgattgcattagtcttaattaccatgctcgcggcaatgacaacaggctcagggaatgcgcctttctatgctttcgttgaattaattccgcgcttagcaagtaatatgggtgtgaatcctgcttacttaactattccgatgttacaagcatcaaacttaggacggactttatcacctgtatcgggtgtggtagttgctgtatcaggaatggcaaaaatttcaccttttgaagtgatgaaacgcgtttctgtaccagtattggtcgggcttgtgattgtgattgttgcaacggaaatactggtacccagcacattaggttgatcatcaataaattattgaaataaagttagctttatctactttatttttcattctattgacgggctttgttatgtatagacaaagcccgttttttattaagcaccattttcagataaaaaatatccgccttagagacggatatttggttatttaatagaaattaagcttcgtcgacgttttcttcgtcttcaggtgttggttcaacaatacgtactttattaatacggtgattgtgtacatctaatggttcaaattcaataccatcaataaccactttttcaccgacggcaggaacgcgttgtaagtgttccatcaataagccagccaaggtttcatactcacgtttttcatccaacttaataggaatataaagcactaagtcttccagcggtgtaaaaccattgacagtccatgagccatcttcattctgtactaagtcgtgacgagagtcattttcctctgtacttactggtaaattaccggcgatggtttccattacatcggttaaggtaacaatgccttcgacagagccaaactcatcaaccacaaaggcaaagtgagtatgagcattacggaattgttctaatgcctgtaatagtgataacccctcagggaagattaagggttgtgtaattaataaacgcaaatctaatggttcattacgtaactgttgatttaataattgaataacatttaccacgccgataggttcgtcgctattttcttcgtcggtaataacgagacgagaatggggatcttcttctagtaattggcgaatatcatcttgggtggcttttagatcaacatattcaacatcatggcgtgaagtcataatactattgacgtttcgctggcttaaacccagaacgcgcacaatcatttggcgctcttgaggatcaaacacctcttctgtattagcaactaaatcagaagtgtgagggtcaagttcagaggcttctggtttaccattaataatgcgcaataccgcttccgctgtacgttcacgcaaagagcgagaagctgataagaagcgtcgacggttaaactgtgcgagttggttaaatatctctatcataatagagaaaccaatggcagcgtataaatagcctttaggtattggatagccaaacccttctgcaactaaggcaaaaccaatcatcaataagaagcttaaacataaaataacaatagttgggtgattattgacaaatgtggttaatggcttacttgcgaggatcatcaagaacatcgcaatagttacagcagcaatcataacgccgagatggtcaaccatccctaccgcagtgataacagagtctagagagaatacagcatctagtacaataatttgcgcaacaacagaccaaaaactcgtggttttacgttgttttccctcgttatgatctttaccttctagccgttcattaagctccattgtggctttgaaaagtaagaatatccctccgaggagcatgattaagtctctggcactgaaaggatgatcaaacagtgtgataagaggtttggttagggtgataagccaagagagactaaatagcagtacaatccgcataataagagcacacaataatcctgtgatacgtgctttatctcttaattttgctgggagtttatctgctagaatagcaataaaaacaaggttatcaataccaagtacgatttcgagaacaataagggtggaaagacctacccatatcgtcggatctacgatccattccatacagtttgttttaccttctataaagacggcatatgccgacttgggaataatgagcaatttagcggaatttttcaataaattattattgatagtggcagaataatttcattttatccaaagcaccgtaaaaccccgtccttcaggtcgaggatataaggcgcggttttttaactaactaggtgtttcctgttgctcaatgcaatgattgtcattgaggacttaaaggtcagtaacatgtctaaatcggcaaaaggtacgacagaacggcatggacggaacgtaaaagctaaatctggtttaaaccgctcaatactggagcagggctggtatgatatgcgccgtcagcttgagtacaagcagctctggcgaggtggtcaggtagtggcaataccaccagcctacaccagtcagaagtgcgcttgctgtggtcatacagcaaaggaaaaccgccagtcacaaagtcaattcgagtgccttgaatgtggatatacagcgaatgctgatatcaacggggcacgtaacattttagcggcaggacatgccgtgcttgcctgtggagggagggggcagtcagaccgcccgtcgaagcaggaacccgccgaggtgattcagacatcagtctgaacgcagtagggatccacgtcctttagggcgtggaggatgtcaaccataaggaatgcgatatcgattgcatcaataactaccaccaaatgagagagtgagttactatgtgatcaggttaacaaattgtcagtacattgagactggcaggtttatattcagacgggagttatttcatgtcaaaacagcaaatcggcgtggttggtatggcagtgatgggacgtaaccttgcgctaaacattgaaagccgtggttacactgtatctatctacaaccgctcgagcgataaaaccaatgaagtgatcgctgaaaatccaggtaaaaaactggttccgaattactctattgaggaatttgttgattcattagaaaaaccgcgtcgtattttgttaatggttaaagcgggtgaagcaacagataaaaccatcgcagccctgacaccacatttagataagggcgatatccttattgatggcggaaatactttctttaaagatactattcgtcgtaatcgtgagctatcggctcaaggttttaactttattggtacgggtgtttctggtggtgaagaaggggcattaaaaggaccttctattatgcctggtggtcaaaaagaagcctatgagttagttgctcctattcttgagaaaattgccgcggtggcagatggcgagccttgtgtcacttatattggtgcagatggtgcaggtcactatgtgaaaatggtacacaatggtattgaatatggtgatatgcaactgatagcagaagcttattcagtattaaaacactcactaggtttaactaacgaagagttagctgacacttttaccgagtggaataaaggcgaattaagtagctaccttattgaaattactgctgatattttccgtaagaaagatgaagaaggtaactaccttgttgatgttattcttgatgaagcggcaaataaaggcaccggtaaatggactagccaaagctctttagacttaggtgttcctgttacgttgattacagaatctgtttttgcacgttatatttcttcactgaaagatcaacgtgtggcggcatctaaagtattatcaggcccagcaccaaaagcatttactggtgataaaaaagcctttatcgagaatgttcgtcgtgcactatatttaggtaaaattgtctcttatgcgcaaggcttccaacaattgaaagctgcatcagatgaatataactgggatctaaattacggtgaaattgcgaaaattttccgtgcaggttgtatcattcgtgctcaattcttacaaaaaatcactgatgcctataatgacgatgcgaatatcgctaatttattattagcaccttactttaaaaatatcgctgatgagtatcaacaagcattgcgtgatgttgtttgttatggtgttcaagcaggtattcctacgccaacattctccgcggctatctcttattatgatagctaccgtgcgcaagtgttaccagcaaacttaattcaagcacaacgtgactattttggtgcgcatacttataaacgtactgataaagaaggcgtattccatactgagtggatggagtaagttttaaaaacagtgagttataagtgttaggggtgctgaatttcagcacctttttactatttgtaattaaaaagttatagttaaaaaatactttttaactgcattttatagtacttttattaatcattatcatcttggcgaataaaatgaattaactcgggctgagcaatccgctgataatcttgtgtatttaaaataatcgagcgttctaatgttccagcattaaaggctaattcatcaaaacgttcaaataatagcggatcagcaaccagttttagtgctggatgaaaactaaaaggtgggatcgcgccaaatacacattgcgttagttcatcaacttctttcgggcttgcaagagaggctcttgtcccaccaatagcgatagcgagttttgatagatcagcttgtttatcagcaggtaaaatggccagtacgtgttgtttaataccattaccttttacatgacaaactagaccttttgccccttgccctaattgtgtacctcttattttagcaacttcctcagaacgacccgcggtcgggtgttccatgacgcgataacgggcgtggtggttattgagtaatgtggttaattgctcgaaaatagtcaaagacatcaatgactcctaagattaagcatgtattcttattcggtcattatacgactttaaaaaaatttttctgcggtgatatgtttctttggtatttattattttgataagcctatcaaattattttgttacaaatgataatatgttaatagtattatcctattgaattaataggataattagattatctatattattttagagctctaatattataaaaaaattaatatttattcattatattgataatgatcaatttaagaataaaaagaatagaacatattaaaacgtagattaaattactaaaaggaagtcaataatggccagttcaacattttatatcccttcagtaaacaaattaggcgcaggttgtcttgcagacgcgataaactcaatgaaagactttggctttcataaagcactgattgttactgatagtgttttaaatcaattaggtgttgtaaataaagtgagtgaattactggcgaaatcaggtattgctagcgttacttatgatggtacagcgccaaaccctaccgttgaaaatgttgaagcggggttagccttattaaaagagcatcaatgtgactgtgttatctctttaggtggtggctctcctcatgactgtgctaaaggtatcgcactagtcgctgccaatggtggtaagattgccgattatgaaggggttgatcgctctgagcatccgcaattaccactgattgcaattaatacaaccgctggtactgcttctgaaatgacacgtttttgtatcatcacggatactgcgcgtcatattaaaatggctattgttgataaaaatgtaacaccaatcttatctgtaaatgattcagagttaatgattggtatgccaaaaggtttaaccgcagctacgggtatggatgcgttaacccatgctgttgaagcttatgtctctactgccgctaatcctattactgatgcatgtgcgttaaaagcagtgacgatgatcagtgagtctttacgtaaagtcgttgaaaacggtggtgatacagcagcacgtgaaaatatggcttatgcacaatttttagcgggtatggcatttaataatgcttctttaggttatgtgcatgctatggctcaccaattaggtggtttttataacttacctcatggtgtatgtaatgcagtattactgcctcatgttcaagcttataacatccaagcagcagcaggtcgtttaaaagatatagcgcaagctatgggtgttgatgtttcggcaatgaatgatgagcagggtgcgcaagcttgtattgaagagatccgcaaaatcgccaaagatgtcggtattccagcaggcctgaaagaattaggcgtgaaagaagaagatttcaaaacattagctgaaaatgcattaaaagatgcatgtgccatcactaaccctgttcaaggtagtgaaagtgatgttatcgagatattccgccaagcaatgtaatcgctaaaaataagagggttaatataaattaacatcttgtttaagcaaagaattaacacctcaaatatcaatgtcgtatttgaggtgttttttatattatcaagtataaagtggtcatgtagtttaatgactgatacttattttattgcgcttttttatgacgcttttgtaagcaatcaatcacatcagatagagatagcgattggtcttgtaatagcaccattaaatgatagagcaaatcagaagcttcattttttaactcttcacgatcattaacagttgcagctaaagcagtctcaacaccttcctctccgactttttgtgcgatacgtttggttccgctggcataaagttgtgccgtataagagctatctggcgaggcgcttttacgctcgcgcagtaagttctcaagctcataaagaaatccccattggctttgagccggagcaaaacaactttcagtcccattatgacaagtaggcccgattgggtgagctaaaataagtaaagtatcgttatcacaatcaggataaatatccactaatttaaggaaattgcctgatgtttcaccttttgtccataaacgttgtttagttcgtgaatagaaagtgaccttgccactgtttagcgtcatttctaatgcggctttatccatataaccaagcattaagacatcaccagaaatagcattttggataatgacaggcattaggttatcgactttttgccaatctaattgggcgagttttgtattattcattatattcttaccttaacgccattttctgcgagatactgtttcaattcgttgatattaatgatctgcttatggaatacggaagcggcaagggcaccgtcaacattggctaatttaaatgcatccagaaagtgtgacatttcacctgcaccgccagaagctatcatgggaacctgagtgacttggcgtaccagtgcgagttgttttaaatcataaccttgtcttacaccatcttggttcatcatgtttaacactatttcccccgcacctcgttgctgtacttcttgtacccaatcgagcgttttccatggcgtttgttgtgtgcgtttttcatcacccgtaaattgataaacgagatattccccagttttttcatcaaaccatgtatcaattcccacaactacacactgcacaccgtagcgatcggcaaggcgagaaatcagtgttggatcagaaagtgcaggggaattaattgagattttatctgccccaaaagagagaattttcccggcatcttctactgagcgaatgccacccgcaacacaaaatggaatatcaatcacttcggctacccgcgatacccaacttttatcgactactcggccatcagaagaggcggttatatcataaaagaccagctcgtcggcaccttctttcgcgtagcgttctgctaagggaacaatatcaccaataatttcatggttacgaaattgcacacctttaacaacctgtccatcacgaacatcaagacaaggaattatgcgttttgccaacatgatatcgcctcttgtaatgtgaatttaccttctaatagtgctctgccaacaataatgcccgcaacacccgatccaggaagtgctgcaatatcctgtaaatcaccaataccgcctgaagcttggaataaaatatcagggaaacgctggctaatttctttatacagttcgacgttagaaccggctaaggtgccatcacgagaaatatcggtgcacaatacatgctttaatcctacaggttgataaagtgcgatgatctcttctagtgtatagggggagttttcttgccagccacttaccgccacccattttttaccttgttcgtcgatacgaacatcaagggcgagtacaatcgcatcagcaccataacgctcaaaccatgttttgactaattcgggctggctcaccgctgtagagccaatcacaacccgacttgctcctgcggctaatagtgacttcacatcttcttcgctacgaataccaccaccaacttgcacaggaacgttaacacaggcaactagctgttttaatagtgggatctgccgtgcaagtggatctttcgcgccagttaagtcgacgagatgcaataattttgctccgtcttgttgatattgttggtagcggcggatcggatcatcatcataatcacgttgtttattataatcaccttgatgaagacgaacgactttgccatcaattaaatctaatgccggaataatcataacgcgttacatctccaaaaaattcttaatcagttgagcacccgcttttcctgagcgttcagggtgaaattgcaccccatagaaattatctttctgaatggcactgctaaagcgtgaaccatattctgtttcggctatggttgagtcattgagccctaaaccatagctgtgaacaaaatagaaccaagcgtcgctgtcaatattgcgaaatagagggtgagcgggttttgctaatacctgatcccaacccatatgcggtaagggtaatcctttggtatcaagtttattgatattaccgtcaactaatcctaatagagggatattgtgaccttcttcactcagagaggccaaaatttgcatccctaagcaaatgcctaatacgggctgggttaacgctttaattaaagggataagttcacgggcttttagttgttccatagcggcactggctgttcccaccccggggagaaacagtttatcagcagataacacgatatttttttcataagaaataattggatcgtaacctagcctttgtacggcgtacgcaaccgaggctaaattagcacaacctgtatcaagaatgacgactttcatcacagcacaccttttgaactgggtaaggtatttccttcaacacgaatagcttggcgtaaggtacgaccaaatactttaaacagactttctgctttgtggtgatcgtttttgccttttgattttaagtgtagagtgcagcccatagtgtaagagagagagcggaaaaagtgctcaatcatctctgtgcttaaatcaccaacgcgctgatatttaaattctgctttatattcaaggtgagggcgtccagaaatatctagcgcacaacttgctaggcactcatccataggcaaagtaaaaccaaaacgtgcaatgccgcgtttattacctaatgcttctcgcagtgcttcgccgagtgcaaggcctgtatcttcaacggtgtggtgatcgtcaatgactaaatccccttgtacattgatattcatacgaaagccaccgtgggtggcaatttgatctagcatatgatcaaaaaaaccaactccagtgctaatttggctctcgccttcacgatcaagccagatatcaatggcaatttgtgtctctttggttttacgttcaacgtgggagtagcgatcttttttcgtcagcaattcactgatagctgaccagcttaattcattggcgttataacgtaatccgttgatccccatattttcagctaattgtagatcggtttgtctatcaccaatcacatagctattggttttatcaagagcactttcaaccagatattgggtgactaaccctgtttcaggtttacgacaaggacagttgtcttcaggtttatgagggcagattaatacttcattaaaaacaataccttgtgaagaaaaaacctgcatcatgagattatgagggggttcaaagtccgcttgtggaaaactgtctgtaccaagcccatcttgattggtgatcataataagcttatagcccgcctgttgtaagttgagtaatgcgggaataacgccattttcaaaggcaagcttattgagactatcaacttggtgatcggttggtggctctgtgatcaaagtaccatcacgatcgataaaaagaattttctggctcatggttgagatccctcagtggtgatttttattgttatcattggtgatgtttatacgtttgccgtttgcctattttttatagcggttatcacgctatcacactcttgacgcgtaccgatagagatgcgtaaacaacctgccagcccatattgacgctgttgatcgcgtaaaataatcccttgctcccataaactgcggaaaacacaatcagcatcagtgaatttcactaaaatatagttggtttcactacaataaacctgttcaacattgggtaaattttttagtgcatccgctaaatatgttctattgcgtacaatttccgttacccgttgtttcatcgcttctataccttggtcagttaatgcttgtgccgcaatatcagcaaccggggtagaaagtgggtaaggggcgatcaccttaagtaataattcaataacaggtgaattggcaagtgcaaagccacaacgcagtcccgctaatgcaaaagctttagagagagttcgcaaaatgactaaattcggatactcttttaaccaagtgactagtgatgcttgaggacaaaactcaatataagcttcgtcaatagccacaatggctttatcttttgctaatgctaatacttcgcggatcagtgaaggatcaacgatattgcctgttgggttattgggactacataggtagataagttttacattatcaagttgtgatgcaatggctttgacatcaggctcccaatcagcaagagcagggacaacacgctgttctacaccaaaggtttccgcactgacgctgtacataccataagtgggtggacaatagagaacagcatctttaccaggctcacaaaaagcacggatcagtagttctatcgcttcatcggcacctcggctaactaacacttgctcaggttggacgcctgcatatgctgcatagcgattaattacgttaaccggctgacactcagggtagcggtttaaatttttttcattaaacgtaaagtcaggagcggtagggtattcattggcatttaaccaaaccgagccatttccacctaaacgtctcgctgattgataaggggttaactggcgaacattttttctggctaatagggtaatatcaaagggcgtgttcatagctagttatctccttgagccaaggcgttaacgcgaagtgtgacggcatttttatgtgcagttaattgctctgcttgcgctaatatttcaatggtattggctaaatcagccaaaccttgagcagtcagtttttgtatggtcatacgcttcataaaatcggctaagcctaaactcgaataggtggcggtataaccgtatgtaggtagtacgtgattggtgccagaagcgtaatctcccgccgattcaggagaccaagcccctaagaacactgagccggcgctagtaatgctatcaacaagtgagtctgcatcattagtctgaataattaagtgttcaggcccatagcgattactgatttcaatacattggttgagatcacgggtgataatgacacgactttcggctaaggcttgttgtgctatttctgcgcgagttaattgtgttaattgggcttgcgtctcgctaatgaccgctttggcaagggcttcatctggggttaatagcaccacttgtgagtcaggaccgtgctctgcttgtgatagtaaatcagcggcaataaaggcaggatgagcatcggcatcagcaatcactaatacttccgaagggccggctggcatatcaatagccgcaccttgtagcgattggctgacttggcgttttgcttctgtcacataggcatttcccgggccgaaaattttatctacctttgggatagactctgtaccaaaagccatcgcagcaatggcttgagcaccaccgacttggaatatttcatcaataccaatttgttgcgcaatatacaaaatttcatcagcaatcggtggcggagagcataaaattattttgcgacaaccggcaatacgggccggtagccccaacatcatcacagttgagagtaaaggcgctgatcctccgggaatataaagtcctactgcatcaatagggcgactgacttgttggcaaaatacaccaggttgcgtttctacctcaatggttttaggaatttgcgcttcatgaaaacggcgtatattgctcatggcttgcgctattgcttgtttgatttcgttattgagccttgcacaagccacgtcaatctgtgtttttgtcaccaatacgctatcgggagccgctttatcatatttttgactcagtgccttaagggctttatccccatcgttgcgtacctgagaaataatcgtagcaacttgctctgtaatagacgctgatgcggatatcgctgggcgagtgagtagctgttgttgttgctgttgggtgcatttatcccagaagtttaatgtattaaacgccgttttcatcatctcaccttattccatcattttttcaattggtaaaacaagaattgaacttgcccctaatgcttttagtttttccatcgtttcccaaaagagggtttcactgctgaccatgtgcattgctactcgattttgatcacccgctaaaggaaggatggtcgggcgctcagcacccggtaatagggcgataacatcttcaaggcaatcacttggcgcgtgtaacataatgtattttgattcgcgcgcttgaataactccttgaatacgcgtcattaagcgatcgataagggcttgttttgttgcgtccatttcaccgtcacgttgaattaaacaagctttagaacgataaataacttctacttcttttaatccattggcttctaatgtggcgccagtagaaactaaatcacaaatagaatcagccagaccggctcgaggtgcgacttcaacggagccatttaataagcaagatttaaaggtgatccctttttggtctaaataacgttttaatagattagggtaagaggtggcaatacgggtattattgaggcattcaaccccttgataatcaaaatcaaccggtgcagcaagagataaacggcaagcaccaaagtcaagacgacgcagtgtgatataacttggattttctccttgtgctcggcgttttagtaattcttcttctaatacgttttcaccaataatgcctaaatcaaccactccgtccatcactaaaccggggatatcatcatctctgacacgtaaaatatcgataggcatattttccgcataagcgataaggcgttgttggtttaagtttattttaatgccacaacgcgctaaaagtgctcgtgaatcatcacttaaacgacctgatttttgcatggcaattcgtaatcttgctttatctaacataatgttaccctatctttgtccgtattcttgttatgaaatttagctataaaaaaaccccggaagttgccttccggggtttttattttattgtctgcactcagaccaccggaagcgttacctaaacgtcttccagcactcatcgcctgaaagactagtcaggatgatggtgatgatggtggtttaattgaatgctatacataatgttttcctagcgaataaaaatacccgttataaataattaaccagtatttagaatttgtctgcctttcaacctacctgatttataaagtaaaaagcaacctattttttaataataatttaaataaattgtaaccttatgttttttagagaattttaatatttcttttctttacttaaccgagtaagtgcgccagtatattaaagcaggctaaatatatataacgcttaagcagtttttatcagtaatggataaaattaagttttgttacataatttaaataagccatgaaagtaggggtagaaaatgaaacggatcacgatagtcggattaggttggttaggattaccacttgccaatgccttgcgtgaagcggggtatcaagtaaaaggaacaaaaaccacagaagatggtgtagaagcagcacgaatgagtggtgttgattgttgtctaatgaatttaacaccggctattgagtgtgatagagatgattttgattacttaatggaaactgacgtactgattattacattacctcccagtgcggcggggggaggatatgattatgttgaagggatacaaacattagtggatagcgccatgtctcggcatgtgacaagagtgatttatattagctctacttcagtatatggcaatcaaagtggtgttattacagaagaagttgatattaggccggaaacgcaatccgctaagatgatagcggaagttgaaaattggttacatcgcttaccacttacgaccgtcgatattttacgtttggcggggttagttgggcctggtcgtcatgcaggacgctttttatccggtaaaaaacaggtcaaaggtgcacatcagagtgtcaatttagtgcatttagacgatgttatttttgcgatagagcaactgcttgctcaaaatgaaggaggccgtttatataatttatgtgcccctattcatcctaaaaagaaagatttttacagccgtgttgctgcacagttagatcttactccccctgaatttgctctagaagataaaccgccagcacgagagatcgacggtcaggagatttgccgagatctcggattccattatcactatcctgatcccgacaaaatgccaatgagttaatttaccggcagtaaaacgacatcacggaagatctgattttcacttaattgtgcaaaccagcgttgtagatgtggataatttgcaccttcttggcaaacctctagccatgggtataccaaaggagcaatagcgatatcagctaatgaaaaatagtcaccggcaaaataagctgttttagccagttgatcatcggcaattttgatcagttggtttaatttcgcttttaggctctgtacaagctgtggatcttgctgctcttttggtgtgcgaacaagatttatcatcatttgttggattggagaaaaaaggctaccattcgaccaatccatccatttttcaacgtttgcgcgttgctttacatcggttgggtagagatgataattttcatatttggtacataaataacgaattatggtatttgactcccataaggcaaaatcatcatcttgtaaggtaggaatagatgcattgggattgagtgctaaatagttggcctcatgaagtccaccaaaagggcctccgacatcaatttgttcgtaaggagcttgaagctcttttaaacaccacaggacttttttaacgttcgatgagttttttctaccccagacttttaacataaaggtctcctaaaccacgataagtaacaaaaattccctctgtagggcgttaaatatgaatataagataaatctttatctatcaatgttggcgtcttattccataaagccctatagtaggaaagctttaacaaattgatataaaagggtgatcggtaatgaaaacaaatcttccatccgtattggctaaggttaccgcgggaatgggtttactgctaattatttctagtcctacttttgcggtgaataatcctgtgccgcctcaaattgaggctaaatcttacgtattaatggattataacagtggaaaaatacttgcttcagagaagcctgaagagcgcctagatcctgccagtctaaccaaaataatgagtagttatgtggtaggacaagcgataaaagagggacgtatgtcgcccgatgatattgttattgttgggcgcaatgcttgggcgacgggtaatcctgttttaaagggctcatccttgatgtttttaaaaccaggcgatcgagttaaagtgatcgacttaaatcgaggtatggtgatccaatctggtaatgatgccagtattgcgttggcagaacatgttgccggtagccaagaaacctttgttgatcttatgaatacctatgccgcgaatttaggtttaaaaaacactcactttaaaacagtacacggtctagattctgaagggcagtacaccacagcacaagatatggcgttattaacagctgccatgatccgcgatgtaccttcagaatatgatattcataaagaaaaagaatttaccttcaacaatattcgccagccaaatcgtaaccgtctattgtggaataaaaatatgaatgtcgacggtgtaaaaaccgggcataccaatggggctggctataaccttgtctcttcggcaaccgaaggaaatatgcgtctgattgcagtggttttaggggcgccatcagataaagtgcgttttgctgaaagtgaaagattactcggctggggtttccgcttttttgaaaccgtgacacctgtaaaagagaacgtgcccctgactacgcaaaaagtatggtatggcgataaaggtgaagtggctttaggtgttgctaaagatgcatcaatcaccattcctaaaggagagctaaagaacttaaaagcctcttttacattgactaaccccgaattagaagcaccattaacacaaaatcaagtagtaggaacagtgaatttcttactaaacgatgaagtgattgagcagcgcccattagtggtaaaagaagcggttgaagaaggtggtttctttagtcgtatctgggactttgtggttaaaacagtctctggttggtttaatgcgctttttggttaattaagttcataattactgaaaaactcacccatttaaaataagaatgccagtattaactggcattctttattgagtaggttttaagtgccttagaacagtccttttattgccccatgatcatcaacgtccatcgccattgctgccggttttttaggtaatcctggcatcgtatttattgtgcccgttaatgaaacaacaaagcctgcaccagcactgacatacacttcccggatattaatggtaaaatcagtcgggcgaccaagtaatgcgggatcatctgatagagaatattgcgtttttgccatacaaatagggaaatggccaaagcccatatcctcgatttttgttagcatctcttgggcgttagcattgtaagtcaccccttttgcaccataaatttcttgagcaatggtctctatcttttgctttaaaggcatattatcagggtagagtaattgaaactgtggtgcatcattttctagtgtatcaataacctgattggctaattcaataccacccgcgccacctttttcccatacttgactaatggcaaaacgacatcctctttgctggcaatattgggcgataaattcatgctctttagcagagtctgtcacataagcatttactgtaacaataaccggaacaccatattttttcagattttcaatatgcttacctagattttcgatccccgttgctaaagcggtgagattttcgtgatcccactgtgttttgcctaagccaccattatattttaatgccttagtggtaacgactaaaactgcacagtctggttgtaagtcgcctatgcgacatttgatatcaaagaatttttccgcacctagatcagcaccaaatcccgcttctgttacagtgatatcagccagttgaagagcaagtttagtcgctcttaggctattacagccatgggcaatgttggcaaaagggccaccatgaataatcgcgggggtattttctaacgtttgtactaaattaggattaagggcatctttaagtaaagttgccatagcgccgacagcgttgagatcttcagcactaacaggctcgccttcatagttatatgcaacgatgatacgtgctaagcgctgttttaaatcattaatatcttttgctaaacaaaggatagacataatttcgctagcaacggtgataacaaagctatcttctctaaccaccccatctttgtcgccacctaatccaatcactaaatgacgtagtgcgcgatcattcatatccatacagcgcttaaaaataatctttttaggattaatgttaaggggattaccttgataaagcgagttatctaacatcgctgctaataaattatttgcagaggtgatagcatgaaaatcaccggtaaaatgaagattgagatcttccatcggtacaacttgtgaatatccaccgccagccgctcctccttttagaccaaaacaagggcctaaggagggttcgcgtaatgcaataatggcacttttgcctaattgattaagggcttgtcctaatcctaccgtaacggtggttttaccttcacctgctggtgtgggattaatggaagtgacaagcaccaatttaccctgtttttttgaggtgatttttgaccaaatactctggctaaacttggctttgtatttgccataaaattcaatatcgtcttggtctacatttatttttttagcaatatcttggatgggtaaaagcggtgcttgatgggaaatttcaatatctgatttcattttggttctctttttatcccgtgtagagctacatgagtgataatgcatcaatgctatcgattcaacagatcaagaaaaaatgtgtcgctctgttgctacttattgagcgaataaccctctaattaatcaactttagctaataatataaatatgaccaatagatttataggtttatagatattggactttagaagatatgctcggtgtcacatgatactgccattgtgataaaaaatataaaattattatgatgtgattgaagagatataggacgggggagcaaaaataaataatgccagcaaaagctggcattggtttatgggtaacaatcatgtcaaagtgttaaattaatcgcaagagactttaatggctaagccaccttgtgatgtttcacgatatttagaattaatatctttacctgtttcatacatagtctcgatgactttatctaaacagatacgtggatcactgacacgacgaagcgccatccgtgctgagtttaccgcttgtacggcggcaatagcattacgctcgatacaaggcacctgtacttgtcctgcaaccggatcacaagtaagacctaagttatgctccattgcgatttcagccgcaatacagacttgctcaggactaccccctagcagttcagttaaagcccctgcagccattgagcaggctacaccgacttcaccttgacaacccacttcagcaccggaaatagaggcattcattttgtacagcgacccaataacaccggctactaagaaaaagcgtgtataagagttttcgttgactgggcgaataaatttatcgtaataggagagtacggcaggaataataccgcatgcgccattagtgggtgctgttacaacacgtccaccggcggcattttcttcgtttacggctaatgcaaacatattgatccaatcaaccactgtcataggatcggtggtggttttatcttcagtcactaacatacgacgtaatgcagacgcgcgacgaggaacacgtaatggtcccggtaataagccttcggtattaacaccgcgctcgatacctgatttcattacctcccaaacggcagcaaaatgggctgagatctcttctttactgcgtaatgcaagctcattttgcatcaccagtgcagaaagagagagaccggtttccttacagtgacgtcgtaaatcagcagcatattgataaggataaggtacttcaactttattctcttcgggctgaccaaaatgctcttcatcaacaataaagccgccaccaatggagtaataggtttttttcaacagaagttgttcgccattataggcgctgatagtcataccattttcatgaagaggtaaattacttttatgaaaattcatgcctccaaccgcggggaaatcaacctcttgagcaccattagctaacatcaaacgtccggtattttcgacttgtttaataaaaggtgcgatagcgtcaatatcaaccgtatcaggtaaattaccggctaatcccataataatcgcgatgtctgttgcgtgacctttacctgttagagataaagagccatacacatcaacgactacgcgggaaacagaggagagaaggtttttctcagcaagtaaatcgacaaattctttacctgctttcattgggcctaccgtgtgtgagcttgaaggtccaataccgattttaaaaatatcaaaaacgctaaccataatattcgcctccctaatttaaaggcgcactgtgtgttattagaatgaaaactgttttgtagactgtagcgatatggctactttcattttagaaagtagccatcgataaacttattagttaaagaaataattaatgaaagtgttacctaaggtgtagaaaaccgctgagattgcaatcagacccatgataacaacaaatacgttgctaatatggccttgatattttttcatcgctggtactttacggatagcatacataggcattaagaacagtaacattgcgatgattgggccacccagtgtttcaatcataccaaggatacttgggtttaatgttgcaacgatccacgttgtaaccaacataaacagagctgtgattttgtttaaacgatctttttcgacattcttaccaattccgcgcatccctttgataattaagccattgaaaccttcacgagcccctaaatagtgacctaagaaagatttagtaatcgcaacaaaggcaatgaaaggtgcaatgtaagcgataacgggtgcttcaaagtggttagcaagataagacagaatactgatgttttgctcttttgcttctgctaaattttctggtgttaagctaaatacgcagctaaacacgaagaacataacagtgatcaccatcatgatatgagcataagctaagatgcgtgaacattttttctctgcattgtcaccgtactcttcgcgttttgccacagcaaaagcagagatgattggtgagtggttaaaagagaacaccatcacagggatagctaaccataaggttactaacaagccttggctcataccagaagttgaggcgtgatcaaaagagagcgtatcaagaatggcaccattccattcaggaatgaggtataaagcaagtaccatcaagatggcaacgaatgggaatactaagacactcattgctttaacaatagcttgttcaccaaagcgaatgatacacataataccgacaatcagtaccagtgataaaatcgcacgaggtggtgctgtcatatgcatttggtgaacaataaagctttctaccgtattagtgatagcgacactgtaaaccaacaagataggataaatagcaaagaaatagagcagagtgattaatacacctgctgttttaccaaagtgttcttcaaccacttcagtaatatcttcacctggatttttacctgatagcacaaagcgacacataccacggtgtgcaaaaaaggtcataggaaaagcaagtactaacataatcaacagaggaattaagccaccaatcccggcattgataggtaaaaacagaacgccagcaccgatagctgtaccatacaaaccgagcatccatactgtgtctgacttacgccatgttttgtaatcactttgggtattaccctgtgcgatagaaccagctttggttgtatccataatactctccgaaataacgcggtaaaaaaataatgaaaaataaagtgagtcattgcctttttacaaagcaatcactgcataaattttattatgaataaatgagcgcattgagtgcctggtgttatctcaatatcttcaattaccacatactaaaaaagctagattttaaaagaataaaaatcttctaaaatttgaaaaaatattcaataagtttatatctagactttagatgggcagaatatagtgtttttcaggataaactaccgtgatcaccatctcaaatgctaaatataactaaaaaatcgctaaatgtaacattttttatactttgtgctttttataaacattttgaaatggttttccaaaattgtttattttttagaataaaattaaatatagaaatattcatatgttaatgattatttttcctgctttctattttttataaaatagatgatttaaatcaatgaggttatttttatttacatttaaaacattattttaactttataatatgttgatttatatataaaaaataaattttgtgacttggctaaaaaatcacttaaaagcctatagaaataaaaaaatatgattatttattaatggtcttctactgtttgataaaatagttatctcattattttatcaataacagaaatattgtttatatttggtacaatattcctgttaataaaatcataaaatattttatttctagtgaatataaaaacttcattttgattaaaataacaacgaaattattttttggacaaaaaatataataatagagaatatttttattcatatattaatatataaaatctttatttatttatattaaatagcagaaaaagacaataaaaaagaccacattaatactgtggccttttgcggttgtttcttatcctaataggattaagcttttgtccaacctttgcgaataggatatgcaaagcagagttgataaagctggtggatcgctttttgtaactttttcccgccttgtgaccaaagtatttggcttaatgcacaagagaggagagcaacaataaatgcaccaaccatatctattggccaatggacgccaagatagatacgagcccaagcaatcgcaagacctaaaataagcatcagcatgccaatgcgtttactgttatgccaaaaaagataagccagtgcgatagtaaacacgaaagtaccatgattactagggaaggaaggcgttgcctcatgatcaaggaagttataaccgatattggctgcaaaagggcgatcatggggagctatcataccgataaaccaagagatagagagggcaataatcagagcgaccccagccttacaagctaaagtcctttgctgatcaatatgcttttcatttccccatagccaatagaaagctaaagacagagggaacaagtaaaccaagtatttagcaataaagatcgcgacattaatctctaaaggggaggccgaaggggttgcattcatcaatgaaaatacggctaaattgagttgttccagcaaagtaagctccatatatatcgtgctgataggcaatgtttatggtacataatcagtcaatcccacaaggttaaatgaggctgtgcgcagggtaaagagtaattttcttatttaattgtgctttttttcaagaattgtcagttttttttcgctgactgactgaattgactaaaaaaacactttacccttgagtaattgcacttttttatctatcacccatatgtttaaaggtattaatcaatgtggtttcaaaaagagattttacttcaagcaaaaccgagaggatttcatttaatcacacaggcactgttgcaagaattacccgaactcagacaatacaaaataggtattgctcatttttttattcaacatacttctgcgtcattaaccattaatgaaaacgccgatccgactgtacgtagtgattttgaaagtttctttaatcgctgtgtgaaagagcatgaagcttattaccttcacacttatgaaggcagtgatgatatgcctgcccatcttaaaagtagtttacttggtcagagtgtgtcggtgcctatttgccaaggggaattaaatttaggtacatggcaggggatttatttaggtgaacatagaaatcacggtgggcgtcgacgtattgtggtgacattacaaggagagtgttactgaattttaggcaataaaaaacccgacagttatttcaccaaaaggggttgaaactatcgggctcctcaatatttggggacatcaaagaaaagcagtggcactaattcagactacgagttaaaaagaaagttcgccaattaatgaaaaaaattagaaatatttttagtaagtggtctgaaaagggaaaaaacaacggagaaagtagtaggtaaaaaagaatgaaaacgctaaaacacattgataaataaagtattttagcgttttaaaaattagttatagatgcctaaatgctctttcgcataagcttcaaaatctgtgcagccaccaatgtgtttttcatcaataaaaatttgtggcacagtttcaactggtttaccgacagtttttgataagtctgctttggtaataccttcagcttgaatatccacatagcggaaatcaaagtcatcacgtttttcagacaaggtttcagcaagttgtttagctcggacacaatatgggcaaccaggacgaccaaaaattacaacaaacatacgacactccttattgaggaaataaattcaggcataatagtctttatttgtgaatactatgcctttttattcgaataaacaaaaacagttattgccttttagtgtaataaattatatcaatttgctgaatgatgatataggactagtgcaaggtgatgaacggagacaacatggaaaagccctctaaacgggatatgaaaacactatcagatatgccaaagccaattattattattgaactaattggtattgtgctattggttatcgcttacttatatattaatcaatatatgacttcaccggaatggttaacaacctatacagggcaattgaccttggttgttttaggggtgctttgtatgatcccacctgcaatacatatcgtttggcgagcgatctatcgtttaaccttcttaggtattgatactaaggcaactgaaaataaaaagaaaaagccacataacgaaaaataaatacagttttatatcatgatgagtgaaagaggctaggtgacttagcctctttgtcacttgactttatttgtggcgtttttctatttattactgccttctggtgaaaaaaagtggcaaaataacgtcaatgcagaaaagcactcttatttttagcgcgtaaaggttatttaatggacgctgttgttactatcgatctggatcagctgaaatcttggctggatgaattacagattgctttctatgaatgtgactcttgtcaggcgttacatttacctcatcttcaatatatcaatggtatttttgatgctaaaattgatgtgcttgatgatgtgcttgtttttaccgctattgctgaattaaaaccatcagcgatagtgcctgttatggcaaatcttagtcaaattaatgcaagttccctatttattaagacgttcctagaaattagcgatgaaaacttaccgaaattagttttgagccaatctttacctattgctgtgggactatcatttaatcagttcgagctgtttttacataaggctgaagagcagtcagcagaagtgatcagtgagatctttaataatgattttctgtatggcgaaagacaagaaaatgaagaagatgaagatctagacataacatcatcatcaacagactcttcatatactgtacattaattactatctataacggtcacaaaatcttatgcaatgcgcacgctccagtgcgggtgattgccactcttgtgggtggctttctcttgcttattccgaacaaattaatcaaaaacaacataatctattagacttattgcccaaaaactacgcgtttactcaattagcgccggtagaaagccaacaagttaaatttcgtaataaagcgaaaatggtagtaagtggtagtgtcgaaaaaccgattttagggttacgtaaaccagagggggaaggtgttgatttatgccaatgcccactctatcccgcttcttttgaaccggtttttccaatattaaaaacctttattgccaaagcaggattagtgccttataacgtggaacgtcgtcgaggcgagctaaagtttattttattaacagaaagtcgccacaatcacagcatgatgctacgttttgtgctgcgctcagaaaaaaaactggcgcaacttcgccaagcattaccatggttacaggctcaattaccccaattagccgttatttcggtgaatatccaacctgtccatatggcgatattggaaggtgagcaagaaattgtattaacagagaaaacctttttagatgaatattttaatgagattccgttacatattcgcccgaaaggtttttttcaaaccaatcccgatgttgccgcgtcactgtatgcaacggcagggcattgggtcaaagagttgcagataaaccggttatgggatctcttttgtggctcaggggggtttggcttacattgcgcacaaaaaaacacggaattaacaggcattgagattagtccagaagcgattgaatgtgcacgtttatccgccaatgaattagggttagagcatgtagaatttcaagcgctggactctactggttttgctttagcaaaagagtctgttcctgaattagtactggttaatccgccacgacgaggtattggcgaaacgttatgcgactatttaaatagtatgaagcctcgttttatcctctattccagttgtaatgctcaaacgatggcaaaagatatacaacaactttctcattatcgtatcgatagagtgcaactgtttgatatgttccctcatactgctcattatgaagtgttgacgctcttggttttacaacaaagttaaacgctaatttaatcgcaataacatgttattgtcgttaacgcttgataattttaactgcacaacttaataacccccaaagcggttgttcaactttgggggttaattttaaagcaaaaaacgtggtgtaatgattaaagttgcactaatcacgatgttcaaaagctaaggctttcttctcaattaatctcattaacagtgtcagtattccattgatagctaaataaataatgcctgcagcaacaaataccatcacatcataattttgcccaaagacttgtcggctatagccggttagctcaagtaaagtgatagtgctagcaagagaagtactcttgaaaatcagcaccacttcattggaataagaagaaagggcgcgtttgaaagcataaggtaagatgacattcgctgtttgtagcggtgacatacctaaagcttggcaggattgccattgtccagcaggtatcgccctgactgcaccgtggaaaaggagtgttgaataagccgcactatttaatgctaatgtcaccatggcgcaaaaccaaggtgtggataataattcccacaacagaggaaattcttttaatgaggggaattgtccgggtccataatagattaagaaaaattgtactaacaaaggtgtgccagtaaacaatgtaatatagacttttacgataggtgaaataacagggacttttaatgccaaaataaaagtcattaataccgataacgtaaaggcgactaagagcgcaacaaaagtcagtgataaactggtcggtaagcctggtaaaatatcaacaatataatcccacattatgaggcactccgttcaaatcgggtcgttctcatctctaaccatttcagaatatattggctgactaatgtaatggctaaatagataagtgccacaatgctataccaagtaaaaggctcttgagtacgattggcaatactctgggtttgtagcattaaatcattaacgctaattaatgagactaaagcggtatcttttaagagcactaaccactgattaccgagtccgggtaacgcgtgacgccacatttggggcatgataaagcggaaaaaaatggtgatttttcccatacccaatgcctgtcctgcttcccactgtccggttggcacggcttttaatgcaccacgtaaagtttgtgaagcgtaagacgcatacagaagtgaaagggcgataacaccacaatagaaaggtaaagattcagtatcaccaaagtcaaattgtaaggtgaaagggcctaattcaataccatccatgagcatcatgacaccttgtaaggtgccataatagacaaaaagaaccaccagcatttctggcagtcctctaattagtgttacccagcaagttcctagaaaagcaaaggctttccactttgcggattcccacgcagtaaacagcatggctagaactaatccgataataagagcagaaatagcaagtgtgaccgtagtcacggtcgcacctgctagcgttgttatttcattcatttattaagctattgttgttattaactataattattcaaaccattttttataaatgacatcataggtgccatcggcttttacttcagataatgctttgtttaatttatcttgtaaatcagcattaccttttcttactgcaatagcaaggcctgtaccaaaatagttaggatcagtgaccttatcaccgacaatgcctaattcaggattctttttcagccattcattaaccacagcggtatcaccaaagatagcctcgatacgaccattttttaggtctaacacggcattttggtaactgtcataaggcaccgttttcatctctttatgttgttcattgatgaatttctgatgggttgtcccattttggacaccaatttgcttgccttttaagcttgcaacatcggaaattttacctgtaacggtgataaagaccgctgagttgtcatagtaagaatcagtaaaatctacctgtttttgacgctcaggcgtaatatcaatccccgccattaatgcgtcaaaacgacggaattttaagctaggaattaagctatcaaatgattgattggtaaaagtacattcagcattaattttttcacacatggcatttgctaaatctacatcaaaaccaacgatttgattgtttgcatcaatcatttcaaatggaggataagttgcctcagtagcaaaacgaatagtctctttatcagccgctgttgcagaaagtgtaatactggtcagaagtgctgcaaataatatttttttcattgtcagatcccgatttagtgtgacaagtaattagcaaaagcttccgtttgaggggcagtgaaatgatgattatcaccttgctctataatacggccgttttccatatatacaactttgcttgcggctttgcgcgcaatttcaacttcatgggtcacaataacttgtgtgatccctgtttcagaaagctcttttatgatatcaacaacttgagccgtaatttctggatcaagtgctgccgttggttcatcaaataacagtacctgaggctccatcattaatgctcttgcaatggcaacacgttgctgttgtccaccggataaatgcagtggaaaacgttgtgcataatcacttaaacgtaaacgctcaagtaatttcatcgctttttctttagcttgcggttttgccaaacctaatacacgacaaggtgcttcaattaaattatcaagaaccgttaagtgtggccataaattatattgctgaaaaaccatgccaacattttggcgtaatgtacgaatcgctttcgcattcggttgctggccaaaatcaaaatgtagaccagcaatgtctaattcaccagaacgaggcatttctaataagtttagaacccgcattagagagctcttacccgcaccacttggtcctaacagaaccattgtttcaccagcagaacattctagattaatatcatagagtgcttggtgcgaaccgtagaaacaatttatattttttaattgaatactcatgcgttttttttgaatagtcattaactgtttcaaatgataaaacgatgagaataattatgcaactaatagtgcataaaaaattgctttttttacttaaaaatggatattaggacgattgctcgggctttttaggtgaatttttatccaatctataggcgcaagttgagacggtttgagccatacctttaaaaataaataaatgggctggcatcatggcaaaccaatagagtaaaccactaaaaccagcaggatgccaccaagcacggacatctaatgagcgtaggttaccactatcgtgaatagtaaaagagaggcgccctaaaccgggggctttcataccgaagagtaaagtcagttgtttttcaggctctaactttattacccgccaaccatcaatcatatcacctagcgctagcgtttcacgctgagggcgcccataagtgactttgttgccaacaagatcatctaataaagcacgtgttttccataatgcattaccataaaaataaccttgttcaccaccaatttgctgaacgacatgccaaagtgccgccgcactcgctggtgttgacactgtacatccggcatttttgggataatagccatagccgggtttccaacggttacgtacttcaggagagtaaccccaatcttgatcatctaaagccgcttcttcatctgcgagtgtttctctgactgcgtcatcaaaagaaattaacttttgtgggatcagcttgcgtaaagaggcatctttagcgggaagatcgtatttaagcccttggataagctccttggcgattgaagtgggaactgaagttattagactaataaacccagcagaaataatactggcggggataggtaaagggatcagtaatcgttttttgccggagatgttaataaagcgctcaaaaagtgtttgatagctaatatattcagggccaccggcatcaaaaatgcggtgttgatgggttgggtgatgaataatttctgttaaatagtaaattaaattttttaacgcaataggggatgattttgaacgcacccaacgtggcggggttaatatcggtaagttatataccatatctcgcatgatctcaaaagcggccgagccggggccgacaatcatagaggtgcggatttccgtcacaggaatagagctggttctaagcacttctcccgtgagcttgcgggcaacaagatggggagagtagggttgatctttatgttggagcgcacttaaaaaaataatttgtttaacgtcactctcttctaaagcatcgacgacgttcaatgccgcttggcgctcttgttcgataaggttatgggcatctcccatactgtgcacaaggtaatacacaatatccgtattacggatgacatctcgtaatgttttgggatcgtgtaaatcaacaaatacacagcgtgtattttgccacccttgcgacatcatccaatcgactctacgagcaccggcggtgacttgatggccttgtgctattaaggcaggaataagattttgtccaatatgtccactggcacctaataccaatacacgctgttgattcatcgttaacccactgtaagaaaagacgtaataatactattgttacaaaattttctatgaagtaaagaacgccattaagattggtgtgaccaaacttaatacgaaaccatgcacaattgcagcaggaactatggcaacccctccactgcgttgtaatacaggtagcgtaaagtccatagaagttgaaccacaaatacctaatgccgtatttctataacgattaacaataatggggattagcatgatggcggctaattcacgcattaagtcattaaagaaagcggtactaccaattaccgggccaaacgcatcggttaatacgatccccgataaagaataccaaccataaccagaggctatcgctaatcccatttttgtgggtaatccgagtaaataagccgctaatgcaccacctgcaagggcacttattgccatcactattgcaatggtagtaccgcgacgattaattaagatctgctttggactcatgccactattacgtaattgtagaccaacaagccataataaaaagataagtgcgccttggctggcttgagatgcataaccaaaaattgaccatccggttaaaccgacaaaaaaacctactaccactacaccacaaagttgtagtgattcgagtaccattttgatacgtgaagggggcttagcttgtttatgtgcagggacatgccagggatcttttttatccagcaaccataaaaacagcagattggcaccaaaagtacagataaagaagacactggcataggcaaggatagaaaataaattttcaccaatattatctaacatggctaagctaacccccattaaaaagaggatcacatagaccattgcactaagtaaacggttagccaattgaagcaaagggcgattgtttaacttaatcaaataccctataaacaggggcaataggataatcaataaccctgatagcatttctattccttactgagtgttgtcaaaattataaaataaactaataacgcgaattgcattataacatttgctaatagttatgtggatatagaaaccgcgataagttgaaaatttttattacagaagaagagcctagcacgatctgattaatatagccttaattgtttgaaaaatgagctaattagttatgtgtcgaatagttgagtaaattttattacgctcatgaggaactgtgttttaataaaaataagtcattaagtaaaattattatcagaaagcgtataaagttgatagagatgcaatagatgaaccataacaactgagttgcgacctgagagggaatttatgtatttagaaagagtggaaatagcaggatttcgggggcttaatcgcctttctctcccccttgatatgaatacggttttggttggcgaaaatgcatggggtaaaacttcattacttgatgcgttaaccttgagtttggggatcgaaacttatcaatatgcttttacagcagaagattttcatcgtttacctaatgagccagaaaacagtaaaaaaaacctacaaattattctgacttttaccgaatcacgtcctggtcgtcatcgctcgtatcgttttcgtaaattagcacccgtatggatagctaatggggacgctcgtaagcatatttattaccgtattagtgcagaattagatgagcagcaaaatgtcaaaacctttcgttattttctggataaagaaggtaaacagatccgtttagcgaatggacagaccaaagcgattattgctgaaattgtgcgcctttatccagtattgcgcttacaggatgcgcgttttatacctaatttaacaacagaagttattgactctcataatgagcctcatcgtgaagcatttaataataagatgagtgaattaacgaaagcattaattaataacccagacaatttatcagatgaagatttacgtgaagggttagatgcaatgcaacagttattaggacactattttgctgatcacggtgcgctactgtttaaatctcatttgaaacatcgcaaagtcagtgagccacatattcgaggatggcatgcactagaaaatattaataagattttagcgaaacctaatcagcgcaatattcgtttaattattttaggtatgttctcttctattttacagtcacgaggcagtgtcgaacttgatccttacgcaagaccgatagtgattgtagaaaaccctgaaactcgcttacaccctattatgctttctgtggcatggggattattaaatctcttttctttgcaacgcattacgacaaccaattcaggggagttactctccttagcaccactacaaagtgtttgtcgattagtacgtgatacagataaagttgccgcttatcgacttggcgacaaacaacttcatgcagaagaagagcgtcgtatctcttttcatattcgttataaccgaccttctgcactctttgctcgttgttggttattggtcgaaggggaaacggaaatctggctaatgaacgaattagccagacaatgtaactacttctttgaatctgaagggatcaaagtcattgagtttgcgcagtgcggacttaagccactgttaaagtatgctacctatatgggtatagaatggcatacgttggttgatggcgatgaggcgggtaaaaaatacgccgccaccgttaaagaatttgccgcaaaaagaaatgatgcggagcgtgaccgattaacacggttgccagcattagatatggaacactatttatataaagaaggttttcgcaatgtctatcatgaggttgctggtgttcctgataatgaaaaatggccagtaagacgtgtgatcataaaagcgatacaacgttcatcaaagcctgatcttgccttaacggttgctaataatgctgcacaacgaggtattgatgctattcctactttattaaaggtgatgttttctcgggtagcatggcttgcgagaggaaaagccaattaagtcatttttctatgcttctatttataggggcatagatatctcattgtgtttttattatcgaaaaagttaagggtgattttaggttattaccaacaggactttattttttatttcactcttattgtataagaaggatatttcatggcttttttcctaactaaaaagcaagggaagattatagctgctattttgatttttattgccataggcttattttttttctggccgaaagagcatttacctagttatcaaacacaaaaaattactcgtggggagctttccaaagaagtcacagcaacgggcaaattagatgcggtacgtaaagtcgatgttggtgcgcaggtgagtggtcagctacaaactttatatgtaaaagaaggggatgtagtaaaaaaaggcgatctgctggcgattattgatccgaaaaaagcacaaaatgaggtcgcggaatctcaagaaactaataatgaactgatggctaatttacagcaagctaaagccgaattacgtttggcgcaattgacttatcaacgtcaattaaagctgattggcacacatgttatagcccaagaagagcttgatcgcactaaaacagacgttgaagtcaaaaaagcccgagtggcgacttatgaagcacaaattagaaaaaatcaggcaacactggataccgcaagaactaatttgcaatatacccgtattactgcgccgatggatggtgtggtcacttttatcaaaacccttgaagggcagacagtcattgcagctcaagaagcaccaaccatattaacattagctgatttagataccatgttagtaaaagccgaagtttctgaggcagatgttatctatttaaaacctgatctcaaagcctcttttactgtattaggagcaccagataaagccttcaatggtaagttaaaagatattttacccacacctgaaaaaatcaatgatgcgattttttactatgcacgttttgaagtccccaatgaacaacatttgttgcgtttacaaatgacagcacaagttaaaattctccttgagcataaaaaagatattctcttagtgccattgtcagcattaggggaaaatgtaggcataaatgaatatcaagtagaggttctcgtcaatgggcagcctgaaaaacgcgtagttaaaatcggtattcgtacagatgtttatgcagaagtcattagtggattaaatgaaaatgatgacgtgatcctcggtgagattgcaggagagtcataatgtctgcattactagagctcaacaacgtaagccgtttatataccaatggtgaagaagacacggtggtactagatcagatttcactgacgattaatgctggtgaaatggtcgcgattattggtgcatcaggctctgggaaatcaacgctaatgaacatattaggttgcctagataagccaagcagcggtgaatataaagtggctgggcaatgtgtggcagatatggaaagtgaccaactggctgcgctacgtcgtgaacattttggctttatttttcaacgctaccatttgatggcgcatttaactgctgagcaaaatgtggagatccccgccatatatgcaggtaaaagtacagagcaaagaaaagagcgcgcccgtgcgctattaactcgccttggtttagcagagcgtattcactatcggccaagtcagctttccggaggtcaacagcaaagagtcagtattgcccgcgcattaatgaatggcggagaagtgatcctcgccgatgagccaacgggggcattagatagccaatcgggtaaagaggtaatggctatcttaaagcaattaaatcaacaagggcatacggtgattattgtcactcacgatccattaattgcccaacaagccgatcgtattattgaaattaaagatggtcaaattattagcgataataataatcaccattctgcaccagtgaaaaaggcaccacctgcgatccaaaccgcctcttattttcatcaagtcattggacgttttacgcaggcattaaacatggcttggcgagcaatggtggtgaataaaattcgtaccttgctgacaatgttggggatcattattggcattgcctctgttgtcaccattattgttattggtgatgctgccaaagatagggtcttagcagatataaaagcgattggcgccaataccattgatatctatccgggtaaggagcttggtagtgattcaccagaagataaacaatccttaaccattcaagatgttgatgcgttaaaacagcaatcttatatacaatcagtgacaccacagatttactttagctctcgattacgtcgtggtaatcaagatgcgccggcaacagtttctggtgttaacgaggattatttttcagtgtatgcgttgaaatttgcacaggggagcacttttacgcctgatatgatccatcgccaagcgcaagtagtcgttattgatgaaaatactcgtcatcgttttttcccgaataaacaagcggtgattggcgagcaaattattattcgtaatattccttctactatcataggtgtggttgcagagcaaaaatccacttttggtgataataagtcattacgtgtctgggtgccttacagtacgctaagtagtcgaatttataaccgtagttatttagataacatcacggtaaaagtaaaagagggctatgatgcgagtgttgctgagcaacaaattctccgcttattaacgatccggcatggtaaaaaagatatttttacttataacattgatagctttattaaagcggctgaaaaaaccacgcaaactatgcaactgtttttaaccttggtagcggttatttcgctggtggtaggggggattggcgtgatgaatatcatgttggtttctgttacggaaaggactcgggaaattggtattcgtatggcggtaggcgcacgagccagtgatgttatgcaacaatttttaattgagtcagtactggtgtgtttggtgggaggattattaggtattagcctttcatttgcgattgctatgtttgccagcatgatgctacccaattggcattttgtgttccagcccacggcactgataagtgcttttgcttgctctacagcaattggggttatttttggttttttaccggcgagaaatgcggccaaaatgaaccctattgatgccttagcgagagagtaaaatagcggtagtctataaaagatcaaaagccctatctttcaaaagataagggcttttattggtatgataatgtgagcgtcattttctgtttaaagtgtgaaaatggacgaaataaggggcgagagcggataaaatattatccacatcatacttacttaaccattattcgataataggaatgataagatcagcatgatcccctttaggtccttttattgtgctataattaactttctgacccgctttcagtgtgcggtagccttccattcttattgatgaataatgggcaaaaatatcttcgccacctgcggcaggggtaatgaaaccaaaacccttagcgttgttaaaccacttaactgtacctgtctccatacttagcttctctcatatacttgtctttatttacttaacattactttcagtatatttactgagctgttcataaaacatactctaattaattgtttcaatcgtcaagggggagatgagcaagaaaatgttccgagtaggtgaaactttgatgtagctaacgctttgttatttattttggtagaaaaagagttaataaaaaaccgttgataggcagactttcctatgagatggtaaactgaatgtcatagtgagtcgtgacgtttaacaaaccaatgagtaacacataacaatgggtcagtttgattttttaacagaaaccacactaggggagaaggtctctcagttaaatgagccacctgcgatgtataaggtgatcttgaataatgatgattacacccccatggattttgttgtagaagtattaacaatgtatttttttcttaacgaagaaaaagccacacaaattatgttggacgttcatcataaagggaagggagtgtgtggtgtctatagtgcggatatcgctgaaactaaagttgcacaagtgaatcaatacgccagagaaaatggccatccacttttgtgtacactggaaaaagcgtagtccggtgagtcttttaaggaggaggtgcttatgcttaatcacgaattagagcttagtcttaacattgcattcgcgaaagcccgtgataacagacacgaatttatgactgtagagcacctgttgctggcgctattaagtaacaaatcggcgcgtgaagcattggaagcttgtaaagtcgatttagcagtcttacgcgaagagcttgaaatctttattcgtaaaacgacacctattttacccgagcatgtcgatagagaaacacagccaaccttgagtttccaacgtgtattacaacgtgctgtgttccatgtgcaatcttcaggtaaaaatgaagtttccggtgccaatgtgctagtggcgatttttagtgagcaagagtctcacgccgcttatctactacgtaaacatgatgttagccgtcttgatgtggttaattttatctctcatggcattttaaaagatgatcaacaaaacagtgatgatcagtctgatatgggcgatataaatgcacaatctcaacaagagatgccacaaggcgatgatcgcatggataattttaccactaacttaaaccagttggcgcgtcagggtaaaattgatccacttatcggccgtcaagcggaattagaaagaacgatacaagtcttatgtcgtcgacgtaaaaataatccattactggtcggtgaatcgggtgtcggtaaaacggcaattgcagaagggctcgcatggcgtattgaacaaaatgatgtgcctgatgtgatgaaaggctgcacgctctattctcttgatattggatctttattagcaggaaccaaatatcgtggtgatttcgaaaaacgctttaaagcgttattgaaaacacttgaaaaagatgaaaaaagtatcttatttatcgatgaaattcataccatcattggtgctggcgccgcctctggtgggcaagttgatgccgctaacttaattaaaccactattatcaagtggtcgtattcgtgtgattggttcaaccacttatcaagaatttagtcagatctttgaaaaagatcgcgccttggctcgtcgtttccaaaaaattgatgtaattgagccttcggcagatgaaaccgtattaattattaagggattgcgtcagaagtatgaagcacatcacgatgtgcgttataccaataaggcaattcaggcagctgttgatttatcggttaaatacattactgatagacaccttcctgataaagccattgatgttattgatgaagccggtgcgaaaacccgtttaattgcaccaagtaaacgtaaaaagacgattaatgtctctgatattgaatcggtagtagcaaaaattgcccgtattccagaaaaaacggtttctagcagtgataagtcaatgctaaaaaatctggataaccaattaaaaatgttggtgttcggtcaagatcaagctattcatgccttggctgaatctatcaaaatgagccgagcaggtttagggcaagagaataagccggttggctctttcttattcgccggacctactggggtgggtaaaacagaagtaacggtccagttggcgaaagcgcttaatattaagctactgcgctttgatatgtctgaatatatggaacgacatacggtaagtcgtttaattggggcacctcctggttatgttggttttgatcaaggtggattactcacagatgcggtgattaaaaacccttattctgtagtgttacttgatgagattgaaaaagcacatcccgatgtgtttaacattctgctacaagtgatggataacggaacacttactgataataatggccgtaaagctgattttcgtaatgtgattttggtgatgacaaccaatgcgggtgttcatgaaacgcaacgtaaatcgatagggtttactgaacaagatcatagcactgatgccatggttgaaatcaaaaaagcgttttccccagagtttcgtaaccgtttagatggcattatttggtttaatgcgctatcagccgatattattgctatggtggttgataaatttattgtcgagttacaagctcaattggatgataaaggggtatcgctagaggtaagtcaagaagctcgccaatggttaagtgataaaggttacgataaagcaatgggagcaagacctatggctcgcgtaattcaagaaaatctgaaaaaaccattagccaatgaaattctgtttggctcgttagttaatggcggctcggtttctgtgaccttaaatgaccaagaaaataaattacagtaccaatttactagccaagaaaaattggctaaaaaagaagataccgttatttaataatagcggtttatcttaggctaaaaagcagacaccacaggtcagcatcaattcatgctttgcctgtggtgttttttttcacccgaaatgatgatattgcgggagagaatggattgggatcaacggctacggaagatgatacggcctttgctcaggtcatatggggtcagctcaacggtaaccttgtcgcctgtcaggatacgaatatagtttttacgcatttttcctgaaatatgagcggtaacgacgtgtccgttttctaattctacacggaacatcgtgtttggcagagtatccagtacagtgccttgcatttcaatgttgtcttctttggccatctaatcctctaagttttaataaccatattttttaaacggcaagataatgccgaaaatattgtcctatgtaaaggaatgttattggttaacaaagatgtttgctttgctaacaagttaatattccttaccgttacttgtgttttagttgctgaaaaacaaggttaataacacaagtcataattctttattgtgcggtatttattgcaataaaataacaacatccaaaccacactttggatgtgcaagatgaatttttgtatagaccacagcagtgaaattctatttaaaatctgatgggctttacaaaaacgagtggtgattataattccaacgattgctgataccaacactttttatcaataatcacctttttccaacgagatagcgcctctaaatagcgatctctggcaatttctatcgcacctaatgctgccgtatgagagtttaacacttggcaatcaaatagttgacccccataacgcagaaaatggttataaaaagcaacaaaggcacatttagaagcattatttcgacgactaaacattgattcaccgcagaaaacggcaccaacgttaactccatataaaccaccgatcaattcgtcgccctcccaaacttctacagaatgggcttctccttgttggtgcaatgcccgatagccggtttttatatcagggcctatccaagttccctcatcacgtacactacaggcctcaatgacatcagagaatgcctgatttaaggtgatggtataaggcgcttggcgtaaaaacttacgtaacgtacgaccaatatgcaatgttcctgcgggtaagacggctcggggatcgggtgaccaccataacggcgtttcatggggtgtataccaagggaaaatccccgtttgataagcctctttcaaacgagcaggggaaatatcgccgccaattgccaataacccacttggctcttttaaagccaaatggggggcaggaaaagtcacatcgtgttcatctaattgaaacaacggcatattacgcctcatcatgtggcattaacaatgcttgtctttgatgaaatttagcatactgaccttgctgttgtaataactgacgatgcgtgccggtttcgacaatgtgaccgccatccatcacacaaattttatccattttatctaacccagaaagccggtgggtgatcattaataccgctttgccttggcaatgttgctgtaatagtgcgaggatctgttgctctgtatctgcatcaagaccttctgttggctcatcaagtaagataagtggtgcattatggagtatggctcttgccagccctaaacgtcgttgttcgcctccagaaagctgtcttccaccatcacccatccatgcatttaaaccttcatcattttcgaccagttgttcaagaccaacttggcgtagaacatgagtaagctcttcatctgtcgcatcttcttttgccataattaagttctctcttaaagtatggctaaaaacatgcacacgttgaggtacaacagacatcattgaacgtaatgtcgcttcatcataatcagcaagagataaatgatttaatgtgatcacgccctgagagggatcgaatgcgcgattgactaattgtaagagtgttgatttaccacaacccgttttacccagtaatgccacatgttgtcctgcttcaatggtgagatcaacatgattgatcacaggcatgggttgattaggataggtaaagcagacatcccgtagtgttaatgaggcgctcggttttatctctcccccttgggctgggaaggtgacatcgggttgttgctcaattaaatgcgtaatacgcgtagccgatgtcatgacttgccctaaatgttgaaatgcgacagtcaccgggccgagcgattcaaatgccgctaatgcacagaaagtaaagagagcgatgagtgcttctggcataaagtgggcatcaataccatcggcagctaaccataaaatcagtgtggcggttaatcccgaggccaaaatcattagcgattgagataaaccagttaagttagcttgttgtgcttgacggcgcagccagcgtgcttcaagttgtgctaaattttgtctaaagcggggaagggcgccaaaaattgttaattcagcttgcccttgtaacatactggtgagtacggtgcgatattgccctcttaggtctgtgagatcacgaccaatgggctttccggcataataaaatacaaaaggtaataccaccagcagggtgagcataataccacctagcgtatttgctaagtgagcatcaataagcccaagcccaaacataatggtcatgataaccacaaaggcggcaattatcggtgagatcacccggatataaaggtgatctaaggtttcaacatcagctactaaacggttaagtaattcaccttgacgaaaacgggcgatccccccaggagagagcggtaaaattttcttaaaagtgaaaacacgcaagtgtgagagtacacgaaaggtggcatcatgactgacaagacgctcaaaataacgccccgcagtacgaaatattgccgcacctcgtaccccagcggcgggtaacatatagttaaaactataaatgcccgcaaaacccgctaatgacgtgcccgctaagaaccagccagaaagtgttaaaaggccgatactggctaataatgttaaaattgccaacaaaatacccagtaacagcataaaccagtgacgacggtataacgcgagaaaaggaagcagtactctcatgatcaaagttcctctttacgatgagcaagaagacgagcaaaggcaccatgttgttgactgagtgactgataagtcccagtttcaatgatttgccctttttccattacccaaatctgatcatattccatcgtttcttctaataagtgggtaatcaacagcgtcgtttgatgtaatgaagcttcattaagcgcttgcataacgcgctgttcactgtgagagtctaaacttgctgcaggctcatctaataataaaaagtgacaaggtgataaaagggcgcgagctaccgcaatacgttgggcttgaccaacggaaagacgggcagcattatcaccaataatggtgtttaaaccatccggtaattcgttaataaaatcacttacataagctttttcaatagcttgatttatcttcgcttcactggcgttcggatcacttaaacgaatattatccagcagggtttgctctggtaagttagggttttgtcccacccagctgatacattggcgccatgcctgtggagagagttgagttaactcaacaccattgacggttaatgagccacgataaggtaaaaaacctaacaatacattaagtaatgaactcttacctgcgccactttgcccgaccagtgcaatacgctgtatgggatgaatggtaaagttaagagggcctgccagtttggctccttgatgtgacaagatttctaattgttgggcaactatttcaataccttggtcggtattaatagtttgattacccgtaggttggggctgttcaccttcggcttctaaaaactcaaccaaagagccagctgcacctaccgcctgtgctttagcatgataataggtgcctaagtcgcgtaatggttggaaaaactcaggggcaaggatcagggctaaaaaaccagaaaataacgtcacgcctaacccataatcaccaaagctcaattctccaagataggaaaaaccaaaatagaccgcgacgaccgcaatggatacggcggtaaagaattctaatacgccagaagagagaaatgccatacgtagcacttccatggttcgcttacgaaagtcttccgttgcatccgttatctgttttacttctgcatcaccacggttgaataggcgcaatgtatccaaaccacgtaatctatcaaggaagttgccacttaagcgacctaaggcaagaaaattacgccggttagcatctgctgcgcctaagccaactaacgccataaataaaggaataagaggggctgtgacaaaaagaattaatcctgcggcccaattaataggaaaaatggtaataagaatcagcaaaggtacaatagaggcgagatacatttgcggcagataacgcgcatagtaatcttgcatatcttctatttgttctagaataatcgttgcccaacttcctgcgggcttgcctttgacccatacagggcctagcgcttcaagtctatcaagtactattttgcgaatttgctgtctgaccgccataccacagcgatagcctacacgttcgcgtatcgccatcacgacagcgcgtaaaataaagatgctgataaggataaggaaagtagtcgtatgtgtatcacgacttagcccatccataatgaacgcttgtagtagaatggctaataaccatgcttgcgcaataattaataaaccactgactacccctaaaatcattgatagccgtaaccaacggcgggctggagcactttgctgtttcagccatcgaaccaattcattttgtttagttttatccatgagaaaagattcaaatctgcaggtgagatacaaagtatcaaaaacgccaagaataataatgattactctttaacgaccaagctagtatgttacatggtaaaaggcgctactgaaatagcgccttgaaaggaagtgaggattttagttagattttagtgcgtctaagtaacgttctgcatctaaagcagccatacaacctgtaccagctgaggtaatggcttgacgataaatatgatccattacatcacctgcggcaaaaacaccttcaatagatgtttgggtagcattgccttgcgtaccggattgaactttaatgtaaccgttatctaaggctaattgatcttcaaaaattgccgtgttagggctatgaccaatagcaataaagacgcccatgacctctagctcttcggttttatcacttttcgtatcttttaagcgcactttagtgacacccatatcatcacctaacacttcatctaaggtacgatcggtatgcaaaatgatattgccattcttaactttgtccattaaacggtcaattaagattttttcagagcggaatgaatcgcggcggtggattaggtgcacttctgaggcgatatttgctaaatacagtgcttcttctacggcagtattaccaccaccgacaacagcaactttctggttacgatagaaaaagccatcacaggttgcacaggcagaaacaccacggcctttaaatgcttcttcagaaggtaaaccgatataacgtgctgatgcccctgttgcaatgatcaaggcatcacaagtatattcttgttcatcaccaaataggcggaaaggtcggtttttcagatcgactttgttgatatggtcagagataatctcggtattaaatttttcagcgtgctgaaacatgcgatccattaaaccaggaccagttaatccttcagggtcgccaggccagttttcaacttcagttgtggtagtgagctgtcctcctttttcaacacccgtaatcagcacgggttctaggttagctcgtgctgcataaactgctgcagtatagccggcaggacctgaacctaaaataataagtttgctatgtttgatggtgctcatggatacctcatctttgattaggcttgatgcgaattgagcgattgtaggagaaataagacgttaaaaaaagccaagaaagggaaatagcgataatattttaactattttagcaatagttaatagtaatatagtttaataattatagagttatattgcgttaacatcatcgaattaacctgaaacattttgctttacaattgctgtttatcttgcatatatagacaataacatagcgccttgttctgatttttgctcatttgctttgacaatccgctgtacatttgcgaaaacatgactgtaaaagataattatcctcagacgtaataggtattatttttagacagacagggcataggatagtgcttttgcaagatgaatagataagaatttggataaaatgattgttttatctggcattaaataaaaatagattggtagtttgctctgaccgtttgataccgaggtctcaatatgatgctgaaggtgtacaggtatgggtataggaaaataaagtaagagaaaaagagaaagagagtatagagatgattgataataaaaaacgtccgggtaaagatcttgatagaatagaccggaatattctaaatgagcttcagaaagatggtcgtatctcaaacgttgagctgtctaaacgcgttggtttatcaccaaccccatgtttagagcgtgtacgccgattagaacgccaaggatttatttctggttatactgcgctattaaacccccattacctagatgcatctctgttggtatttgtggaaatcacattaaaccgtggtgcaccagatgtctttgaacaatttaatatggctgttcaaaaacttgaagagatccaagaatgtcatttagtttctggtgactttgactatctgttgaaaactcgtgtacctgatatgtctgcttatcgtaaattattaggcgaaacgctattacgtcttcctggtgtaaacgacacccgcacttatgtggtgatggaagaagtaaaacaaagcaatcgcctagtgattaaaacacgctaagcctgctaataggttagtgcaaaacaggataaagttaggtacactcctgtttatgtatacagtttcaacgctgggttatctcagcgttgttccgtttaaaccttaagtgaaacctggagagccctctttgagccaggaatatacagaagataaaaatattcgttttactaagataagtaaccgccgtcgtatttgggaagcccttcttattttgataggcattggtgctatctttttaatgatttctttactgagcttccatccagccgatccgagttggtcacaaaccacgtggaatgaacctattcaaaacttaggtggcaatattggtgcatggcttgctgatatccttttttcagcatttggcttgctcgcttatgcaatccctattgtggtggtatttggttgctggaatgcattacgtcatcaaaaaaatcgtgaatacacagattttttctcccttgcattacgtacaattggtgccttggctctggttcttacatcttgtgcgttagctgatcttaattttgatgatatctacaattttagctctggtggggtgattggtagcttatttagcaaggcattgctaccttggtttaatatgctaggtgcaacactggcgctactatcagtatgggcgataggctttacgctatttactggctggtcatggctgacgattaccgaaaagattggtgcggttatcttaggtgcggttgcttttattactaatcgtggtcaaaaagatattgactatgatgattatgaagaacccgccgatcctattcaggcagatcccgaggtgctggtggataacaacacccagccagaacatcaactttctgcgcaaatagaaccagatagtgatgatattctcttttctgcaccttccgcccttgagttagcgcgtcagcaagaaatggcgatcacgccacaacatgatgatataactgaaacttcagaagttgctagcggatctgcaaccccaacgatttcagccacagagacagttatcgctgaggcgcacgagagcaaagagcgggcagagcatattgttgataatcaacaaccgacgcatgccacaacccatgatgcagaagtaacaccgccatccattatggctactcatgacgctagcccagtcactgagcctgaacctgaacactatcgctttgaaataccatcggcatttcttaagcaacaagcgcattcctctgattctatggcagacaatagtgtcgtgacagaagaagtaccgacaaccatgccactgacggaaaacaaacctattgagacaaacgaagcgccaattgtctcgcaaaaaacagcggcggataatagcgaccatagtgcatcattatttacgccatcatttacgccatctgctacatcaacagatagcaattcagcttcattaactcaaacagccgccggtgttgccagtgtggcaacagcagcaatagtcagtcacggtgcacaagttaaacaaggattagggcctgaattacctcgaccaaatcctgtacgattaccaacgcgtcgagagctttatggtattcgtatcccatcacaacgtgaggcggaattacgccgccgtgaagaagcgcttcaacaagatcatgaagacgatttagcggatatacaagagcaggctaatttcgaacaatcgttacgtcagcaatttcttgagcaacaacgtgagcgctatggtgaggatacatcagcaacacaaaatgttgagccaaccatcacgatgtcatcagcgacatctagctcgcagtcaacctatgacgagtatgacgagtctgataatcaacctttcattgatacccataccttttctgcgcaagaaacagaagaggagagtgatgagtatgaacaacacctcgctgagcagtttaagcaacaactgcaagaacgttacggtgaggatgttttacaggatgaagatgacgaggtattgccatcagtcacgactggagcatccgagacgtcagcctcggcacaagggtatcatccccatattcagcactcttttgcgtctcaatctacccctgttactcaacagactgataacagcactctttatcctaacagtgatgcattcttacaagtatcacctcgtgatgatgaagaagaggaatacacaccgactatcgagttacaagaaaatcttgatgcattaggctcgttatcaccggtggatgatttgttagatgaagagcctgcagagcctgtttttacgccgatggtaacccctgcagagccagtatcttctgtatcttctgtagggcaaacacctattgagcctcaagcacagatggctcaacattttgcacagcaacagcaacagcaacagcaacagcaacagcaacagcaacagcaacagtcattaattcatccgttattaatgcgcaatgataggccgttacaaaaaccgacaacaccaatgccatcacttgacttattaacctctcctcctatggatgatgaacctgttgatatgtttgagcttgagcgtattggtaagttaattgaagcgcgtttaaatgactaccgtgttaaagcaaaagtggttggtatttcaccgggcccggtgatcacccgttttgagctagagctagcgcctggtgtaaaagctgcacgtatttcaaatctatcccgcgacttagcacgttcactttccacgacggcagtgcgtattgttgaagttataccgggcaaaccttatgttgggcttgagttaccaaacaaaaaacgccaaaccgtctatatgcgtgaactattagatagtgatgcattccgtgacagtcgttcaccattaactgtggtattagggaaagatatcggtgggcaacctgtggttgctaacttggctaaaatgcctcacttactggttgctggtactacaggttcgggtaaatctgttggggtgaatgcgatgatcatcagcattctctataaagcgaagccagaagatgtacgctttattatgattgacccgaaaatgttggaattatcggtttatgaaggtattccgcatctgttaaccgaagtggtcacagatatgaaagatgctgcgagtgctttgcgctggagtgtcgcagaaatggaacgccgttataaattaatgtccgcattaggggtacgtaaccttgcgggctataacgaaaaaattaaagaagcggaagccatggggcgtccaattccagatccactatggaaaccttctgacagcatggcacctgagttgcctatgttagaaaaagagccttatattgtggtcatcgtcgatgagtttgctgatctaatgatgaccgcgggtaaaaaagtggaagaattaattgctcgcttagcacagaaagcacgtgcggcgggaattcacttagtattagccactcagcgcccttcagtggatattattactggtttaattaaagcgaatattccaagtcgcatcgcatttaccgtatcgagtaaaatcgactcgcgcactattttagaccaaggtggtgccgaatccttgttaggtatgggtgatatgctttatgcccctaatggctatatgccagagcgtgtacatggtgcatttgtcagcgatgatgaagtacatgcggttgcaacagactggaaagcacgtggccgacctcaatatattgaagccattaccaaatgtggtgaagaaggcgaaggtggcaatggtggtggttatgatgatggtgaagagcttgatccgctatttgatcaggccgtagaatttgtggttgaaaaacagcgagtctccatttccggtgtacagcgtcaatttagaataggctataaccgtgcagctagaattgttgagcagatggagatgcagggtattgtcagtgcacctaatcacaataatacgcgtgatgtattatcaccaccgccagcagaaatgtaatatcttgaaaacagagttatcagcgcttaaatcagcatgataatctaataaatatcactataacttatacgccgacatgatgtcggcgtaatctcagtcagaggcgtgttgaatgaaaaaagtattactcacagtctgtgctatcgcgttgtttggtagccaagccgcttgggcggatgctcgtcaagacttacaacaacgtcttaataaagtgaatagctttcaggctaactttagtcaaacggtgaccagtaacgaaggtgcgttaattcaaaaaggggaaggacatttaaaagtacagcgtcctgatctgtttaattggcaaatgacggcaccggatgagagcacactaatttctgatggtaaaacattgtggttttataacccatttgtcgaacaagtgacggcaacttggttagagagtgccacaacgaataccccttttatgttgattgcgcgtaatgatagtaaagaatggcaaaattacgatgttaagcaaaatggtgatcgctttgaattaacccctaaaacagagaacaatttaaagcacttttctattaccgtttcacctaatggtcaaatccaacaatttgcggctacagagcaagatgggcaagtcagccaataccaattaacggcacaaaaggtcgcccccattgatgcatcagcgttccgctttacaccacccgcgggtgtgacggtggatgaccaacgctagtgaggctattttgagtaatttatcactcgacttttcacaaaatgaatttcaacctctggccgcgagaatgcggcctgaaacattagaacagtatattgggcagaagcatctactcgctgaaggtaaaccgctaccacgggcgataaaagcaggccaattgcattcaatgatcttatggggacctccgggtacaggaaaaaccacattagctgaaattatcgggcgctatgcccaagcggatatagaaagactttctgcggtgacgtcagggatcaaagagatcagggccgccattgacatagcgcaccaaaatagaaatgcggggcgtagaaccatcctatttgttgatgaagttcatcgttttaataaaagccaacaagacgcttttttgccacatattgaagatggcactatcacctttattggtgcaacaacggaaaacccttcttttgaattaaattcggcactgctatcacgtgcacgagtttacctgctacgctcattgacagaaacagacattgaacaggtattacagcaagcattagatgatactgaacgtggattaggtgggcgtaatattattttacctgataatacacgcaaaatgattgctgaattagtcaatggcgatgcgcgccgttcactcaacctgcttgaaatgatggctgatatggcagaagtcgatagccaaggcaaacgaacactaacagcggaattattaaaagaaattagtggtgaacgtagcgcccgttttgataataaaggtgatcgattttacgatcttatctctgctttgcataaatcagtacgtggctcggcacctgatgcagcactttattggtatgctcgtatcatcactgcggggggagatccactgtatgttgctcgtcgcttactggctattgcttcagaagatgtcggtaatgcagatcctcgtgctatgcaagttgccatcgctgcatgggattgctttacgcgggtaggccctgcagaaggtgaacgtgcgatagcacaagcgattgtttatcttgcttgtgcgccgaaaagtaatgctgtgtataccgcttataaagccgcactggcagatgcgaaaagtaaacctgattatgatgtacctgcacatttacgtaacgcgccaacgcaattaatgaaagagatgggcttaggtgcagagtatcgctatgctcatgatgaacctaatgcttatgcggcaggagaggtctattttcctgctgaaatggcacaaacgcgttattatcaccctgttaatcgagggttagagatcaagcttgctgagaaattagactggctttctcagcaagatcaaaatagtgtgacaaaacgctatcgcaaattgtaaagatgcggtaaggttattcaatcattagtaatttttttaactaccccttatctcaggtatcttcgcgataggtaaacaagagaatgataggagataaggtttttattaatctatcaataagcacaggataagcatgctcgatccaaatctactgcgtaatgagctagacgcggtcgccgaaaaactggctcgcagggggtttaccctcgatgtggaaaaaattcgtcaacaagaagaacgccgtaaggtgttacaggttgaaacagaatccctgcaagcagaacgtaattcccgatcgaagtctattggtgctgctaaagcgcgtggtgaagatattgagccacttcgtcaggaagttaaccaattaggtgaaaaacttgaagcggcaaaagcggaattagataaactgcaagccgacattcgtgactatgcgttaactttaccgaatctgcctcatgactctgtgcctaatggtaaagatgacagcgagaacgttgaagtatttcgttggggtgaaccaaagacttatgactttgaattaaaagatcacgttactctaggtgaacttacagatggtttagatttcccatctgccgtgaaaatcaccggttcacgttttgttgtgatgaaaggtcaaattgcacgtttacatcgcgcgatcgcccagttcatgctgaacttgcatacagaacaacatggctatcaagaaatgtatgtgccttatttagttaaccatgccactttatatggcacaggacagttacctaaattcagtggtgatttattccataccaaaccacttgaagaagagtctgaaagccaatatgcgctgatcccaacagcagaagtacctgttaccaatatggttagagacgttattctcgaagaagacgaactaccattgcgaatgactgcacatacgccatgtttccgctcagaagcgggctcttatggccgtgatacacgtggtctgatccgtatgcaccaatttgataaagtagagttagtacaaattgtacatcctgaaaaatcaatggatgcattagaagagctaactggccatgcagagaaagtgttgcaattgctcaatctgccttaccgtaaagtggtactttgtacaggtgatatgggctttggtgcacgtaaaacctatgacttagaagtgtgggtaccggcacaaaatacctaccgtgaaatttcttcatgctctaactgctgggatttccaagcacgccgtatgcaagcacgtttccgtgctaaaggtgacaagaaaactcaacttgtgcacactttaaatggttcaggtttagctgtagggcgtactttagtcgccattatggaaaactatcaaaccgctgatggtcgtattgaaattccagaagttttacgtccttatatgaatggccttgagtatattggttaataaaaacctaattactcagtggttataatattaaaaccccctattaaacagggggttttttaatggtataaagagcatcaaaagactagtggtggtaatttctattaaccttttaacctgagtataattttattaatgttttatattctggctatatactagcttcagtatctaatacttcaatgaggttgagataagtaaggcaacaaagagaagaatacttctatttttctttcatttgtcatatcaacaaaatcgtccattgcaatttctataaaatcaatggtgttattatcaatagtgaatttatacattaaatggccactccaactgcgatgaacatagacacagttttctatactatatgaaagccatttatcttccatacatgcaggtaaccagccgtttagtatattttttttagcatcttcagttagggaataattaatatgatgaatcaatggtgttttttcaaaatactttaggttctttaacatttctttatttatcattctttattccacaaataataattgttattacagactacctaaatggacttaaatgatcaaaagaaacatatcattttttctctttaatacagatgaagggtgacattattaataaataatagcaggtagttttttactgatgatttttttaataaaagagcgttttattgctcttaatattatttaataacagttatcaggtgcagaaaaaacagatgattattaaaaaattcttactaaaataagtgagattaaataaaaatataatgcaattcgctattggttaaactgatcacagcagatcatctctatactgctacattaaaattatcgctcaagttaatttcaattatcttatgacgtttctatttatttagaaccctactaaagagcctattgtatgataatttctaaacagcagttacaccaattaatcaaaaataagttacataatgcaggactgaatgaaaaccatgcagacattgttgccgatgtattagttcatgctgatgtgaaaggaattcattcccatggtgctgtacgtgtggaatattatgctgagcgcattagtaagggaggaacaaatacgcatcctaagtttacttatcaagagacaggaccttgtagtgcgatttttgatggtgataatggtgctggacatgttgctgctaagcaggccatggagcacgcgattaatatggcacaagagaaaggcattgctgttgttggggttagacgtattggtcatagtggggcgttatcctactttgtagaacaagcctctgcatctggaatgattggtatttcactttgccaatcggatcctatggtagtgccatttggtggatctgaagtttattatggcactaatcctatcgctttttcagccccgagtgcagatgataaacctattacctttgatatggcgacgacggtgcaggcatggggtaaaattctcgatgcgcgggctaaacatagtgacattcctgacacatgggcggtagatgaagcgggcaaaccaacctgtgatccctttgcagtaaaaggtttattacctattgcggggccaaaaggctatggcttgatgatgatggtcgatgtattgtccggtattttattaggattaccctttggtaaacatgttagctctatgtatcatgatttgacacaaggtcgtgaattaggtcagctccacattgtgattaatccagcctttttcactgatgctgatttatttaaaaaacacatttctcaagtaatggctgagttaaagagtattaagcctgcagtcggttttgaacaggtattatatcctggggaaaatagtcagcttgcagcgcagcgaagcgaaaaagaggggatagaaatagttgacgaaatttatcattacttaaattctgatgtattatttaatcaatcttatgataataaaaatccatttgccagctaagttatattaataaaaaaacagccatccattaattaggtggctgtttttgggttatccaaaattataaaatatttaactgactaatttaccgatattcgattctgcggttttatttaaagaaactttattcccaccatcaccattattgtcattgttatcagtatggttattagtcatattacccatatttttctgatagaaaatatggcgatatgatccatacattgcagtaaaagagagtggaatagtgataaataagcctaatccaaatgggataatactcaagccaataatgatgcttaacagcacaaagaatagaaagccaccaaataagttgtttttaaccgccataaaactggctttaacggcagggatagctttatagtcatttactaaaattaaggcaggggcaaaccaataagaggcagtactgattaagctaaaaatgataataatgatagaagaaaacgtaattggtgtcaggttatcagccaataagccttgaatatagtaggttggtgcatcattaagagcggcttgagcaacttccatcaataatgaaccactgattaatagtgctaaaataaagcctgctaagataataagcacactaataccataagcacccatgatgctaaggtagcgtttgttctggaaaccagaaaataaattatccagatttagctgaccagtctcatattgctgatgggctatcatcataagcccggcaactaatacagctgaaataaacggggagataatcggcccaataagtgggataaatccaaggatagatgagataattaagttaacaagaaagtaaataattacagcgcctacccacataaaaaagcgctctttaactaaatcccagccaatacctaaccactcggttgcccctgaagcacctctttgtagaggaactggcgtaaacacctcttctggctccgtaagcgatgaactattatcttgttccatttttttctctgccttaaaaataattaattgtttataaatataactttttataattcatatcatatctttttattttgtaattaatcaatactattaaactaaagaatgcttaaggataatcttagaaacttctaaatgaccattagaatgagtaacaattttatattgtcataattaactgcaatagtcgttattaaaaatatctttatttgaggtatggaaaacaatattttttaatttagtggctggcgctttctcaaaagaacatgccgcagggaggggaaaacttgatggcagttttacataaaaaaagcagtacattgtgcactgctttttaaaatgggggtgtataaaagcttaatacatcactttatgaccataagatgcaataattgctttaacattttccatcgtctcttttgacggtggatgaataccatcgagtttatactcttctcctaaagcaacccatttatgtttacctaattcgtggtaagggagaagctcgactttttcgatatttttcatatcttttataaattcgcctaaacgatgagcagaatcatcatcatcagaccaaccgggcacaactacgtaacgtatccaggttttttggcctcgtttagctaaatagcgggcgaattccagtgtacgttggttagaaacaccaaccagtttttggtgaatgtcatcattcacttgttttaaatccagcatgactaaatcagtcacgtccattaattcatcgatgacaggatcataacggcgtacaaaaccgttagtatctaagcaggtatggatattttcttttttacaagcacggaaccaatcacgtacaaattctgcttgtaagatagcttcaccaccagaagctgtaacgccaccaccagaggcattcataaagtgacgataagtcactgcctctttcattaattcatcaactgtgacgatttgcccaccatgagtatcccatgtgtcacggttgtgacaatagaggcatctcattaggcatccttggaagaaaacaataaagcgtattccgggaccgtcaacagtaccgcaggattcaaatgagtggatacgaccaagtacggacataacagggttactccaaaactgtctagataaaaaggccccaaagtaggggcctttattctaagcgattttatctactttctcagtaaataaatgcatgagttatcaaattacattgtttgagtgaatgtacgagtgataacgtcttgttgctgctctttagttaatgagttgaaacggactgcataaccagaaacacggatagttaattgaggatatttctcaggatcttccattgcttctaacagcatttcacgattcattacgttaacattcagatgttggccaccttcgatatccgcttcatgatggaagtaaccatccatcagacctgcaaggtttgctttacgaacatcatcatctttacctaacgcgttaggtacgatagagaaggtataagaaataccatctttcgcgtaagcaaatggcagtttagcaactgaagttaatgaagcaactgcacctttttggtcacggccatgcattgggttagcacctggtccgaatggtgcgccagcacgacgaccgtctggagtgttacctgttttcttaccatacacaacgtttgaagtgatggtcagaattgactgagttggcactgcgttacggtaagtgtgcagtttctgaattttcttcatgaaacgttcaactaagtcacaagcgatatcatcaacacgagaatcgttgttaccaaattgtgggtattcaccttcaatgttgaagtctacggctaaaccgttttcatcacggattggtgatacttttgcatatttgatagcagacagtgagtcagccgcaacagatagacctgcgataccacaagccatagtacggtatacatcacggtcatgaagtgccatcagtgctgcttcatagctgtatttatcgtgcatgtagtggataacattcagtgcagtaacatactgagttgctaaccaatccataaattgatccatacggttcatcacagtatcaaagtctaatacttcgtccatgataggtgcgtgttttggacctacttggattttcagtttctcatccacaccaccattgatggtatacagtaaggttttagctaagtttgcacgagcaccgaagaactgcatttgtttacccacaaccattgggctaacacaacatgcaattgcatagtcatcactgttgaagtcaggacgcattaagtcatcattttcgtactggattgaagaagtatcgattgagactttagctgcatattttttgaaattaataggcagttgttctgaccataggatagtcatgtttggttctggtgaaggacccatggtgtacagggtatttaagaaacggaaagtattcttagttaccaaagtacgaccatctaaacccataccacctaatgattctgttgcccagattgggtcaccagagaataattcatcatactcaggagtacgtaagaaacgaaccatacgtaatttcatgactaagtggtcaattaattcctgagcttgttcttcagtcaacagacctgcatcgagatcacgttggatatagatatctaagaaagtagatacacgaccgaaggacattgctgcgccgttttgagatttaacggcggctaagtaaccgaagtaagtccattgtactgcttctttcgcattttgagctgggcgagaaatatcacaaccatatttcgcagccatttcttggatttgacctaatgcagcgtgctgctctgcgatttcttcacgcagttggatagtcatttccagatcttcacctttttccagtttttcttgtaaagaggtgaattgagcgaatttgtctttacgtaggaactcgataccgtacagtgcaacacgacggtagtcaccgatgatacggccacgaccataagcatctggcagaccagttaagatacctgatttacggcattttaagatgtctggagtataaacatcgaatacaccttggttgtgtgttttacgatattcagtaaagatttttttcagctctggatctagctcacggttataagcgtggcaagaactttcaaccatacggatcccaccgaatgggatgattgcacgttttagaggtgcatcagtctgtaaaccgacgatttgttctaaatctttttcgatataacccgcatcgtgtgaagtgatagttgaagcaacagaagtatcaaaatcaaccggcgcatgagtgcggttttcaattttgatgccttccataacttgttcccaaagtgtatcagttgctttagtggaacctgctaggaaagattcgtcgccttcatatggagtatagtttttttgaataaagtcacgaacattaacattgttctgccattcaccttcagaaaaacctttccatgcttcagcaaatttttcatttaaatcagacatgatacttctacctttttacaatggaacttaagaaatcagtcataactgcacggattaatgtttatcgccgcgcagatgcattaaccagtataccagaccgactaggactgctccgccgataatattaccgatagtgactggcaataaattatcaacgaggaaatttgatactgttagatttgaaaattgttctggtgatgcacctactgtagtccagaattctgccggtgcaaaattcttaattacaatacctaaaggaataagaaacatgttagcgatactgtgctcaaagccactcgccacaaacataccgataggtaaaataagtgcaaagagtttatcaattaaagttcgacctgcataactcatccaaactgcaagacaaaccattaaattagctaaaatacctaaacaaactgcttcaataaaggtgtgctcaactttatgctgtgcagtttgtaatacattcagaccccataacccattagctgctgcatattgacctgcaaaccacattaaggcaacaaagaatagggcgccaataaagttaccaatatagacatttatccaattagcgaacatcttagcccaagaaatacgtcctgtcgctttaggaataatggtgagtacagttgaagtgaataagtctgcaccacaaacaaccacgagcattaagcctaaagagaaacaaattcctccaacgagtttagcgagaccaaatggaacagatgcggtgcctgtagtcgctgtaatataaaaaacaaacgcaattgaaataaacattcccgcagtaaaagcagataagtaagttgttgggatatgtttgtttgctttataacaacatgcatcatcggcaacttttgccatatcagcaggtgataataaattaaaagggctgtcagctttcatactaacactctcttatatgttggaataattatagcacgcaataatagtagcaaagggtcttactcctaaagttgatatggatcatagtcgcttatgagagacgcaattttagtacgtaaaaaccggctaaattagctataattatttgattaataataagaaaaaattttttaaattttatcaaaaaattttagcctggctggataaacaaagtaaaaagtaaatataacgtattatttatttctattgacgttaacagttaaaaataaaatttaacgctccatttacttttgtgctaaatataaacattactttatttgtggataatctaattgattacgccagccttaaaaccattataaaaatacggtttttaaatttttgagatctaggtaaataattagcaatttaaactatatttttgtgttttttttagattaaaaagttaatcttatctttttacgtcatatttaaaacttaaaatcgtcacttttgacatatttgacacttttgtcatttgacataattgtcatggtggcaaaattgtcgttatatttttttatatataataaaacactctacttgttagtagagtgttttgattttaaacaaagcgattattattcagttaaaaataattatttaataaataaccttaaataaaatagtgttatttattcgattgacgttttgcttgttgtaatttttcatacgcggctaataaagattgatgaactggcaaattcgctaatgatggatcaatgggttgcaagccataaaaaggttgtttaccttcaattgcatttaatgcagcttgcagtgtttcctcgccatacatacgagaaaatgcctccatatattgtgcaggcccacgctcatgctcttcacgtaatagtaaaagattatgcaggcaacgataataattttgacgcgctggtgtaaataatgatgcgttgaaatcttgtgtccactcaacccaaactaatgcttgttctaaatcgccgccagcgagtgctaacattgattttaattcacctacacgtaaatgactccagccattatctttacccggtgcaataccaatcatttctctgatacgagtaaagtcatctaagccatcttcatcaaattggccaataagtgagaggtactcttcctttgtgccatgacttgttggtaaagaaagaatggtatcacgccaatggacacccataatattattggctagttgcagatcttcagcaggataaatatcggataagccagggactaaaatacggcaagcataaacccctaaatggtcataatccataatatacacttccgcaccacattgctggcacagtgacattaatgtgtgaaattcttcttcggttgaaccactgaaatcccaatcaacaaatggatagtctgcatcttttttaaacagatcccaactaattaaaccactagagtcgataaagtgggtttcaagattagtgtggtcaccgacttcttcatcatcaaaactcggtggattgaaaacatcgagatctttaaggctacggccttgcaataactcagtaacagtacgctctaatgccacaccaaaatcgggatgagcaccaaaagaagcgaaacaagtcccattttgtgggttaaacagcacgacgcaaataacggggaattgtccccctaaagatgcatcaaaactaaaaatagggaagccttctttttctaatgtcgtaatagcttcaataacagcaggataacgagctaaaacttcatgggggattttaggcaagctaattctttcgctgataattctatttttgacatagcgttcaaacacttcagaaagcccttgcactcgagcttcattttgcgtatttcctgctgacataccattagatgcataaagatttgcaatgatattaacaggtatatatacaggtgttttatctgattggcgaataaacggtaaggcacaaataccacgttctgaattacttgattgtaaatcaaccagttcactgccacatagctcaccttcaggatcgtaaaattgacgtaaacgtgcatctaataagccttcaggtacagcatcatcatctgtcagtggaaaccatttttcatttgggtaatgaacaaactcaccttctgcaatatcagcacctaaccagaaatcagaaaagaaataattggttgagagacgttcaaaatattcgcctaatgctgaagccaatgctgcttttttagtagcacctttgccgttagtaaaacataacggacaatctttatcacgaatatgaacagaccaaacgttaggaacaggatttaaccatgaagcttcttcaatgttaaaacctaactgagttaatttttgctgaaagctagcgatagagtcttccagtgcggcatctttgccgggaataaatgtttgtgacatggcaggtttcatcaatattttacgagtgatagttaggggcacatgatactgaaatcgtcgctaatgcactaattatttctcgtgtcggttgattttaaataacattccttatcattaatgcactaatatattagttcttttgataaattcgttctatttatcacggaattactgataataaatcatcataattggacgcgattttatagactcataaggattaaaaaatgataagaaaaacattgctagccagcttattaaccgtaattagtggtaccgtttttgctttacctaatgtgacaatcctcgcaactgggggaaccatcgcagggggtggagactctgccacttcttcaagctacacagcaggaaaattaggcattgatacattgattaatgccgtacctgaggcaaaaaaagtggctaacttaacaggcgagcaagtggttaatattggttcgcaagatatgaacgaccaagtgtggttaaaactggcgaataaaattaatacggattgtgataaaacagacggctttgtgataacccatggtacagatacgatggaagagaccgcctattttcttgacttaaccacagcatgtaaaaaaccggtggtgatggtaggggcaatgcgcccagcaacagcattaggtgctgatggtccattaaacctctataatgccgtggtggtggcaagtgataaagcatctgaaaatcgtggtgtattagttaccatgaataattcggtgattagtggtaaagatgttgtcaaaatgaatacgacagaagtgcaagcattccagccgattaatgcaggtgctcaaggttatgttcatgatggtaaagtacactattatactgctgcaacaccacgcgctgagaaagttgcctttgatgtcagcaaattaaccgaattaccaaaagtaggtattgtttataactatgctaatgcatctgatttaccggctaaagcgtttatagataaccactttaaaggtattgttagtgcaggtgtcggcaatggtaacttatattctgacatcttaaatactttagcagatggtgtaaaaaaaggtgttgttgtggttcgttcaagtcgtgttccggttggatttaccacacaaaatggtgaagtagatgatgcaaaatatggctttattgcttcagaacgtttaaatccacagaaagcaagagtgttattacagttatctttgacagaaacacaagatcccgccacgatccaagaaaactttgaaaaatattaattagattttttgttttttagttaaatcagaaaaccatctgctgataaatagcagatggttttctttgttaaatattattttattttgcgtaacttagtataaattttgatatcttctctattattttgaatattattcatatttttatcgcgtgtgtgtaaacgttctgtcttgataataccatcatttatcagcttgctatcctcactaatatttaaagttaagtttttcatttggctaatagtatttttgggtattaaccctatgtatgtctcgctatagctattgttatttttaccagtattaagccaatattgcatgccaatagttccattttccatattgtatatgaaagacttattttgcagatctaaatatccgtttctagcgagaatatatccatggttattaaatattgttttatttagattaagttgtatggcatttttactacggttactactttctaaactaccataattataaatagtagtatcagaagcattgataatgatatttttagaagaaattataccttgttctttagaattactatttttatcacctaatattatctgattggggagattatttctttttatatttgagcgcatggcgtattcttgttttaagatactttcgccttctttaattattacttcttctttacctgaatgaatatttatctctcctttagaagatataaatcctttttctaacttaatgttattagatatgataatcaggttattaaaagaaggattagaactgcggtcattttgattactgaatacaattttgccaatatgatcaattggcttaccaccaaaagctctttcatctaaggaagagattgatgtttctaatcggtaaccgattaattctctattatcgataataggttttccggttgataacgtttcagataaggtattcgaaaagcgacacccctgacattcaataccatttgggttggctataacaacatgagctgcattgccagctaccgcaatattccctgataagagtgacgttgctccattaaccacttcattaataatagtctcagcggcaacctctttattatttaaaataatgccagcatcagttacatgaaatctatcatatttattataagaaatgcctttggcattttttggtgctattaatatttctgcttgattaggattagcttcattgggtttaattgtggttgaagaatcttgattaataaaaacaagattagaataatgtttatcatgttcatagctaggctgtactacggcttggcatattgatggtgtgtatattacaccaattattattgcatttattaatttcatatgtttacccttgtatattatttagggctaatttagcgatattaaaaacataaataaagatagtcaggtttaaaaggcgtttatttataaaaaataaaaaggctatttttttaatagccttttgggttatatgttattaatgttttcttatattggaaacaacgatttttgcagtaataaatgcaatcagtggggtaatagaaaatacaataaataaccaatgggctgcattttgtgcgccagcaatacctccggggttggttaatcctgccatatttacaacagtacctgaaatggcagcacctacagcggttgaaaatagctgaatagtggtgattgacgtcgccgctttttgcgcttcttccccttgagaaacctgtaatacacgagtgagataatgaggccaagccatgccaattcctgcacctgtaaaaaagagggctagacaaataataatcacttggccataaggtaaaagaagataatttgaaattaataagccaagaacaattatggcagtaaagttaatggcagggccgatacgcataatacgctgagcaatactgcttggttgagatgaagagataatagccgaaaaagaccaaccagcaccgactaaagcagctaaataaccggaaagtaacggagtaatgccatggatcatttgtaaaaaatagggcacaaacacttctgtctgaacacttattcctagcaatgccatagtcagataaataggggatagtggggctgagaaagagaatgttcctttaggaaaaagcccatcatgagatctcttatcgatataaattaataataagataaaaataattgctaatagaaaagataaaatatgatatagcgtaacgtgatacaagctaccgattgagatagataacactgctaatattaataaggtaagttgtaggtagggaagtgatgtttttttgttagcaatatcagcactgttttccttaggaaggatagtaaacagtagaatagcataaggaatgcctacacaaagaatagaccaaaaagcaccccgccaaatattatattctgcaaatattcctcctaatgcgggacccagcaacgttgatattccccacatactggacattaacgccatagctcgagaccataatggttgcggaaacatcaccctgaccaatgaataagctaaagccagtaacattccgccccccgcaccttgaataaatcggccaaccaacaagattggcattgaaggggcggtagcacagataatagagccgactaaaaagcagagtgtggcaaataagtagctattacgtggcgcgagcaaaattaataaacgagaagttagcgccgaagagagaatggatgccaaaataaaaacggtggtattccatgcatataaattaagccccccgatatcacgaacaatagaaggtagggtggtaatggtgatatagacattaatagcatgtaatgccactccccctgctaaagcgagtgattttagactatttcgtcctttaagtagcattccccagctcgcatcttcctttttatactgactccccgacataaaatactcctaacgattatttttgtgtgctacacataatacgtaagtttacaaaagtcattgcgccaattagaggagaatgatacaaccgatagaggtcgttttgtcaaaacatattcagatagggtgaatttgaatgagtcaggtatataactttagtgcaggtccggccatgttaccggcagaagttcttcgtcgtgcagaattagaattatgcaactggcacggattagggcgttctgttatggagatcagccaccgcagtaaagaatttttggaggttgcccatcaggcagagcaagatctacgggatctactcaatgtaccagaaaattataaaattctgttctgtcatggtggcgctcgtggtcattttgcggcattaccgcttaatttattaggtgagaaaaccaccgctgattatatcgatggaggatattgggctaaaagtgctgccgatgaagcggaaaaatattgttcacctaatatcattaaaataaagacagaaattgacggtaaaatcgcggttaaaccaatgaaagagtggcaattaagtgataatgcagcctatgtgcattattgcccaaatgagactatcgatgggattgctatccacgaagagccggattttgatgataaaaaaattgttattgccgactactcttccgctattttatctcagccacttgatgttagccgttttggcatgatttacgctggagcacaaaaaaatattggtcctgcggggttaacattggtaattattcgcgaagatttactgggtaaagcacgtaaagaaaccccttcagtatttgattacacagtactggctgaaaatgactccatgtttaatacaccgccgacttttgcttggtacttatcaggcatggtgtttaaatggttaaaagagcaaggtggcttgcaagagatagcaaaacgcaattatgagaaagcgacactgctttatagtgcgattgataacagtgatttctatattaaccgtattgccacagaaaaccgctctttgatgaacgtacctttccaaatgtcttctcctgctttagatgcggttttcttaaaagaagctgaagagcaaggattagttgcgctgaaagggcaccgtgtttcaggcggtatgcgtgcatctatttataacgcaatgccttttgctggtgtacaagcattagttgattttatggctgattttgagcgtcgccacgcttaatggttaccttttcactgctgcaaaacctgccttattggcaggttttctgataattaaagcacagagagccaataactgttatctctgtgccaatatggcaaatagataaatattaattacgataatcatactatttgacattattacacagcgtctctacctattttgacttatctagcggagcttttacctgtttatggaatcgttgacattacaacccatcgtacatattgaaggcactatcaatttacccggatcaaaaagtgtctctaaccgtgcacttttattggcagctttagccaagggaaaaacgcgtttaactaatttattagatagtgatgatattcgtcatatgctcaatgcgctaaccgccttaggggtacaatatcaattatcaaataataatacggtatgtgatattgaagggttagcaggttcttttcatccccagcagccacttgagctttttttaggcaatgcaggaacagcgatgcgcccattggcggcagctttaagcctcggagagcacgatattgttcttacgggtgagcctcgtatgaaagagcgtcctattggtcatttagtggatgcgttacgtcaagggggggcaaaaattgattatcttgaacaaacggactatccgccactacgtgtttgtgggggattttcgggcgggagtgttgatgttgatggcaccgtttccagccaatttctgaccgcattactaatgatggcgcctttagctcagcaagacaccactattaccattaaaggtgaattagtctctaaaccttatattgatatcacgttagccttgattaacacttttggtggagaaattgaaaatcaaaactatcagcgttttatgattaaaggtggtcaacaatatcaatctccgggtaaatatttggttgaaggcgatgcatcttctgcctcttattttttggcggcagccgccattaaaggagggatcgtgcgagtaaccggcattggtaaaaatagcttgcaaggtgatatccattttgcgtctgtgcttgaaaaaatgggggctacaatacgttggggtgacgattatatagagtgtgaacgtggcaagttaaaagggatagatatggatatgaatactattcctgatgcggcaatgacgattgctacgacagcgctttttgctgagggtgaaacgactatccgtaatatctataactggcgggtaaaagagactgaccgtctatctgccatggcgacagaattacgtaaagttggtgcgatggttgatgaaggtcgcgactacttaactgtgataccgcctaaacagttaacgacggctgaaataaaaacctataatgatcaccggatagctatgtgtttttcacttgtggcattgtctaacacgccgattactattcttgatcctggctgtacggcaaaaacattccctgactattttgaaaaactagcaagtatttctcatgcaaaagtttaattaaaatagcatcaattaaatcgatagtattggcttttctctagtacgatactatcgattttcttaatttaagcgtgtttttattctataaataagtagattaataaaaaattatctttaaaaagcacagcttgtttttaactgcttgtttcctcctctagagagtatgcgtataatgacgcgcaatatattaatactgtttttctctgtttagagcttatgttgtagaacgccataggttcacggcagtaaatatagaaaaacagtgcccatgaaaaggagaaactcatggcggttatcgtccctgtaattactgttgatgggcctagcggagcaggtaaaggaacattgtgtcaagcattagcaaaagcctttggttggcatttacttgattccggtgctatttaccgtgtattagcattagcagcattacatcatcatgtggacattacatcagaagatgcattagtgcctttagcggcgaatttggatgtgcgctttattcctaatgaaaatggattaagtgttattctggaaggtgaagatgtttcaaccgaaattcgtactgaaaccgttggcaacacagcgtcacaagcagcaacgtttcctcgcgtaagagaagcattattacgccgtcagcgtgcatttcgtactgcaccgggattaattgctgatggccgagatatgggcacaatcgtttttcctgatgcgcaagtaaaaatatttcttgatgccagtgcgcaagagcgtgcacgtcgtcgcatgttacagttgcaggagaaaggctttaatgttaactttgaacgccttttatccgagataaaagagcgtgattatcgtgatagaaatcgcgcagtagcgcctttggttgcggcaaaagatgcattaattctcgattcaacaagcttatctattgatgaagttattgaaaaatcgttagcttatgcgaaaaaaatctgcaattaacagcgtaattcgtttttatttcgtttatactaggtaattattaaaatcgggttgacgtgttaatgaatacacaataatgcccgatgaccttgtcacaaaggatgtaacgaggtatgtgaaacaaccccattcggccggatgctaaatggacgttaattaaatttacttgaagatcattaacatgacagaatcttttgctcaactctttgaagaatccctaaaaacaatcgaaactcgtccaggtgcaatcgttcgtggcgttgttgttgctatcgataaagacgttgttctggttgatgcaggtctgaaatcagaatctgcgattcctgtagaacaattcaaaaacgcgcaaggcgaattagaaatccaagtgggtgacgaaattgacgttgctctggacgcggttgaagatggcttcggtgaaaccgttctgtctcgtgagaaagctaaacgtcacgaagcgtggctgatgctggaaaaagcttacgaagaaaacgaaactgttgttggtatcatcaacggtaaagttaaaggtggtttcactgttgaactgaacggcattcgtgcgttcttaccgggttcactggtagacgttcgcccagttcgcgatacaactcatctggaaaacaaagagcttgagttcaaagtcatcaaattagaccaaaaacgtaacaacgttgttgtgtctcgtcgtgcggttatcgaatctgagaacagcgcagaacgtgatcaactgttagaaaacctgcaagaaggcatggaagttaaaggtatcgttaagaaccttactgactacggtgcattcgttgatctgggcggtgttgacggcttactgcacatcactgatatggcttggaaacgtgttaaacacccaagcgaaattgtcaatgttggcgacgaaatcactgttaaagtcctgaaattcgaccgtgagcgtactcgcgtatcattaggtctgaaacaactgggcgaagatccatgggtagctatcgctaaacgttatccagaaggtactaaactgactggtcgtgtaactaacctgactgactatggttgcttcgtagaaatcgaagaaggcgttgaaggtctggtacacgtttctgaaatggattggactaacaaaaacattcacccatctaaagttgttaacgttggtgatgttgttgaagttatggttcttgacatcgatgaagaacgtcgtcgtatttcactgggtctgaaacagtgtaaagcaaatccatggcagcaattcgcagaaactcacaacaaaaacgaccgtgttgaaggtaaaatcaagtctatcactgacttcggtatcttcatcggcttagacggtggtattgacggtctggttcacttatctgacatttcttggaatgttgcaggtgaagaagctgttcgtgagtacaaaaaaggcgacgaaatcgctgcagtagtactgcaagttgacgctgagcgtgagcgtatctctctgggcgttaaacaattatcagaagatccattcaataattacctgtctgctcacaaaaaaggtgctattgtttctggtaaagtaactgctgttgatgctaaaggcgcaactgtagaattagctgacggcgttgaaggttacctacgtgcttcagaagcttcacgtgaccgcgttgaagatgcaactctggttctgaatgttggcgatgctgtagaagctaaatacactggtgttgaccgtaaaaaccgcgttatcaacctgtctgttcgtgctaaagacgaagcagatgagaaagacgctatcgcttctgtaaacaacaaagaagaagctggtttttcaaacaacgctatggctgaagctttcaaagcagctaaaggcgaataatttaagttattaacggaaggcaacgagagtcgttgcctgtttatcggtagtctagggaggtaatatgaccaagtctgagttaatcgagagacttgcaggcctacaatctcatctttcggctaagacggttgaagaagctgtaaaagaaatgcttgatcatatggctgatactttggctgatggtgagcgtatcgaagtccgcggattcggcagtttttctctacactaccgtgcgccgcgtacgggtcgtaacccgaaaactggtgataaggtagagctggaaggtaaatacgttccacactttaagccaggtaaagagttacgtgaccgtgtaaatatttatacggaataatagtttcctatcaaataggcataaagttagtaaactttttcaaaaacggtgcttcggtgccgttttttattgggttatcggttggtattaagttacgttctactattctctattctctattctctattctctattctctattctctatattctttatcacttctctatattctctttattagcgattgttgtaagacattgggcttaccttacgtgatctttctctatttggcttgagttaattttgatatttgccgttattccatcactttttagaacaacttcgcaaaaaatagtgtatgcgcttaaaacgaaagtttttattaaaagagagttcgaaaaaaatacgattttaactatcttaggtaacaatttaacagcatgatattacaaggaaaaattaattatatggatgtaaaatatgattttattagccaagataaaatatatttatagaaataaaatagcgttaataaaatggcattatctatatgctaaatatattgcaatgctagggctaaaacctcttaatatagattatcttgccgttatcattatattaagttgcttacctttacttattcaacgtgaaacactgagtttatctctgagctatacactgattatcgtaggggtattattatatttaattcctttttcatacttacgttttttgttgctattactctgtttttggtgctatgcaaacagtactgcctcctctttaatggccaaaacctctcaacttgctgacaccattgccacaatagaaagcgcaattctagaatatcgtcgcttgccggatagcaatataatgattaaagttgctattcctaaacagcatctcttttctgctaagctctatgccaatatatattggcgtcatccgcctaaaaatgtcgtagtcgggcaaacatggctgtttaaaattcactttcgtgcagtacatggttatttaaatgagggaggatttgacagccaaaaatatgccgtttcagtaagagaaacattgtcaggaaaaatattatcagccacattaacgaattctcaccttcctatttatactcaatttattcactatctttcatcttattggcaagccacaaaaaatagtggtgaaatcacagcattagtgttaggtgataaacgaggtatttctgccgaaaataaaatactttatatgaaaacaggtatttcgcaccttattgtgatttcagggctgcatattggccttgctgctctgtttggttggctgatggcgagaggagtacaatatcttttcccaacgcaatggattaacccacaatttcctttggttattagtttaggttgtggtgttttttatgcggctttatcaggatgggggatccccgcaaccagagcgataataggcctaactatttgggttttactccattggcgtagtggactttttttaccttggcagtgggcgatttggagtgcggcagtgattttattgcttgatccgcttgccatattatccgctagtttttggttatccttttctgcggtatttgccatcattgtttggtattggctctatccattaaataaaagatttagccagcaaaaacgttggtttgttattagactcattcatttgcaactagggctattgatcatcttattaccttttcaatactacttatttggtggtggtaatctttttagcttgcttgttaatttatgggctgtgcctattatttcgtttattaccgtaccacttattatgtgtgggctatttactgcctttttacctgttctacaacctattatttggtcatgggttgatcagtctatcaattgggcatttttctgtgcgccttattttcttacgtattggcaaccctgtggcgctgtcccctggttatttgcattaagcggtattatgactcttttagttatcaaaatgagctggtggcgtcatcatgtgattattttgatcactattgctacttttttatattgtgaactgtctttctctaaacgttatgattggcgaataaccatgttagatattggacatggtttagctattattattgaaaaagagggagaagcggttatctatgacacagggatacgctggaaaagtggtggcactattgctaaaaatgtcattattccctatctaacgcatcatcgattacagcctgttgccatgataattagccatgatcaccttgatcatactggtggtattgacgacttattacgtgcttatcccaagttaactatccgtagtagctttgacaatccccaacatttaccgtgcttacaagggggagtatggcaatggaaagaccttactttcaacgcgctctggccgctgacattatctcgttcacctaaaaataatgattcttgtgtgatttcattaacggatggtaacagtgttattttattaacaggcgatctggaaaaagagggggaagcacaattactgagaaggaaaaaagcctatttaaaagcggatattttgcaagttcctcatcatggtagccaaacatcatccacattggcgtttattcaagcaatatcaccaaaatatgcactagtttctgctgcacgttatagcccttggcgtttaccttctgataaagtacataaccgttataaaaaagaggccattgattggctaacaacatcgataaatgggcaaatttctatcgagtttaaacacggaaagattgatgtagtcacctatagacgagatattttacctcgttggtatcatcagtggtttggtgttttgacgtttcccgagtagaatagcccgctatttattaaaagtttggtaatatatatgaatgatatagacctatcaacgtggcaaacattccgacgcttatggccgatgattcggatctttaaagcggggttgtttgctgcagcaggcgcattaatcataaatgcgggtgttgacgcatttatgatctctttattgaaacctctgcttgatgaaggcttcggtaaagcaagtaatgatgtattaaaatggatgcctttagccgttattggcctgatagttctgcgtggtatatctaactttatttctagttactgcctttcttgggtatcaggaaaagtcgtgatgaatatgcgccgtcggctgttttctcatattatgggaatgccggtgagcttttttgatcagcaatctacaggtacgttattatcacgtattacctatgattcagaacaggtcgcttcatcttcatcaggggctttgatcactgttgtccgtgaaggggcttatatcatcggcttatttggcttgatgttctactatagctggcagttatcacttatcttgattgtgatcgcacctattgtggcggtggtgatcagaatggtatcaacacgctttagaaccatcagtaagcgtatccaaaatagtatggggcaggtgacaacaagtgctgaacaaatgcttaaaggccataaagaagtcttaatttttaatggtcaagaagttgagaataagcgctttaatcatgttagtaaccatattcgccgccaaggtatgcgtatggtggtggcatcttctatatcagatcccattatccagcttattgcttcttttgctttagcctttgttttatatgcagccagttttcctgagattatggataccctgacagcagggacaattacggtggtcttctcttcaatggttgctttaatgcgcccattaaaatcattaactaacgttaatgctcaattccaacgaggcatggctgcttgccaaacattatttgctatccttgatatggaacaagagaaagatactggcacccttgagctgaaaaaaccaacaggtgatattgagttccgtaatgtcactttccaatatatcaccaaagatacacctgctttgaaaaatctgtccttcactattcctgaagggaaaacagtggcactagtagggcgttcaggctcaggtaaatctactattgcaaacctcctcactcgtttttatgacgttaacgaaggggagattttgatcaatggtcacgatattcgtgattacacattaagatcactacgtaatcaggttgcgttagtttcacaaaatgtacatctgtttaatgaaacggtagcaaacaatattgtgtatgcttgtgaagaccaatatacccgtgaggatatcgagaaagcggctaaaatggcccatgctatggactttatccaaaaattagataatggtctcgatactgaaattggtgaaaatggcgtgttgttatcaggtggtcagcgtcaacgtattgccattgcaagggcactattgcgtgatgcgcctattcttatcttagatgaggcaacttcagcattagatactgagtcagagcgggcaattcaagccgcacttgatgaactgcaaaaaaatagaacatcattagtgattgctcaccgtctatcaaccattgaaaaagcagatgaaattttagtgattgaagatggggaaattgttgaacgtggtgctcatcttgatttaattgagcgaaaaggcgtttatgctcagctacacaggatgcaatttggcaaatgattgagcggatttggtctggtaaatcgtggtgttaccttcttttattgcctttttcatggctctatggggcgatcagcctttttaggcgttttgcctataaacaaggctggttatcctcatggaaatcccccgtacctgttgttgtggtaggtaacttaacggcgggaggtaatggtaaaacaccagtggtgatttggcttgttgagcaattaaaagcacaaggctttaaacctgcggttgtttctcgtggttatggcgggaaatcagaccaatatcctttattattgtcgccagaaacacagccggccgtcgcaggagatgaaccggttttaatttatcatcgcactggcgtacctgttgccgttgcaccttctcgcagtgatgcagtcaaagcgctattagcgcaatatgatcttgatattattattactgatgatggattacagcattatgccctacagcgagattatgaaatcgtcgttattgatggacaacggcgttttggtaatggctggtggttgcccgcagggccgatgagagagcgcgctcatcgtcttgattctgttaatgcggttattgtcaatggtggtgattgtcaagcgaatgaaatagcgatgagtttagagggagaaatcgcggtaaatctaaagacaggtgagaaaaaagccattactgagttgggtaatgcagttgctatggcagggattggtcatcctcctcgtttctttaattccttgcaagataaaggggttaagttaattgcgactaaagcctttaatgatcatagtgaatataccctacaagagttacaaatactgacgcctcaccaagagccgctgattatgacagaaaaagacgcagttaaatgccagcattttgcgcaaaacaactggtggtatttgcctgtcagtgcggtattggaagatctatctgtgctaaatcaagtcagccaattagtgacaacgcgaaaaaaacttgtatatgatctgaaacaatgatatttataatggaaatcaggatagcgttacataaagattacctacccactaatcgcataccgcttttgtcgtagttcaatttaactcgctaataccctatctactcaaaagccttgtgtggagagtttttagatctttattgtagagttaatattgttatgctgtggatattattcatgcttgatagttaaaatgctttcgaatagaaattactttaacatttatatcaagcaagtttattgataggtacaggctacaatatagaatatgtcatatatttgtcatgaatattttgtagtttagtgtctgttcaataaatagttatctaatttagctatcacgattttgaacatttatattgaataataaaatgcactacttaaattaatgtgttcagaatttaatggggttttatataagaagacttaataaaaagtagaatgcatgtgtatagaagataaaaactatacaaagaacaaaaggagtttatctatcatgacattacaattaagaatgggtcgcgtaaaatggtttgacaataataaaggatatggtcttattgttgcaaaagatcttgaacaagatatttacgtcaataaaaaagcgattgccaatacaaaaaataaagcactaaccgaaggccaagacgttgagttttctgttatcaaaacagcagcaggtctagaagccgctgatgttatcgggttctaaatagtcgacacctataataaatgggtaagaccatgttttaacctattgatttaattaaaatctatcattacgttgatgcaaaaaggataaaataagacgttatcactgattgctcaaggtaatataaaatggttgccacgttaattagaatgcaataaagataataaaaaggttaaattattatcaataaaagcggaatgtaattctttattaatgatgttgcagacaaaacgataaaaggccacattattgtggcttttttgttgcttatagtgaaaaagaaaatagtaaatttattaatagagaaaatatttagcgaataattaccaaacccgcggtgtagagtattaacgctgatccttccttatgatatccttttatcctataacatgattaacccttgtgagggacaaaatggatcaccgcttactcgaaattattgcttgcccagtttgccatggcaaacttatctttgataaagaaaattcagagcttatctgcaaaattgatcatctcgcttatcctgttcgtgacaatattccggttctactagagaatgaagccagagagttgtcattagaagaggaaaaataacctaatgtttacggtcattatcccaggtcgatatgcgtcgactcggttacccggtaagccacttgctgatattcatggcaaaccgatgattgttcgtgttatggaacaagcaaagcgttcaggtgctaaacgtgtcattgttgcaactgataacttagatgtggttcgcgctgttgaacaagcgggtggagaagcgtgtatgacccgtgaagaccaccactcaggtacagagcgtttagctgaggttatcgaaaaatatcaattcgcagatgatgagataatcgttaatgtacaaggcgatgaaccactcattccacccgcaattattacgcaagtggcagaaaatttagctaattgtggtgcaggtatggcaactcttgctgtgcctatcgtcgactcaaaagaagcctttaatcctaacgctgtaaaagtggttatggatgcgaaaggttttgcactttacttttctcgagccactattccttgggaaagagatcgttttaatctctctcatgatgaaataggcgagcattacttacgtcatatcggtatttacgcttatcgtgcaggctttattcgtcgttatattacttgggagccaagcccattggagtctatcgaaatgttagagcagctgcgtgtattgtggtatggcgagaaaatccatgtagcaaaagcgcttgaagtaccgggtgtcggggttgatactcaagatgacttaattgccgcgagagccgcttttcgggcactaaaccaagagttctaatatttgcagtatattgcaaattaatgtttaacggcactggtattcagtgccgttgttgttttctaccatcgataaaaaagaggattgattatttttttacctaatgatctcattcttcatacgctattttatgccattgtcagcttcatttttattctcaacaaccgcctctatattagatgattcgctaggctttatggtttgccaaatcgagccgataaattcataccatgctcgctcactatgctgaaaataatacgcggaaggggtatatttttcccaaggatgcagaggggtagtaatggctagctgattagcaggtgcaacaatagggtgcatacctctagctaaaaagaaacgttctgcccgcgctaaatggtttgctgaggtcaccaataaaaaaggttgtttaccgataagtttatccacttcatacgcttcttcttcggtatctttaggttgagaaagggcgatcgttttttctgctggaacacctaatgattgtgcaacttgtgcagccacttcggcgctacttattttattgacgccggcaccaccggtaaaaattaagctggcattaggataacgataataaagccttacgccttcagcaacacgaaataagctattatttagcaggttagcactaggtgcccattcagggttataagtaaaaccgccccctaaaacgacaatgtagttaacatcttgtggtgagttttcgcgtaattcataacgtgcttgatacgctttttcactcggcatcaatagagtatctgcgacaggttgcatgcctaacagcgtaagtaacacaatcacgatagtgagtacgctttttcctgttttttgccaacgagtaaaccacagtaaaataagcgcaaaaaaagcaattattaataacagcggtagtggcatgattaggctaccaagatattttttgagcaaaaacagcataaatcttcctaagttgagtgaaatgtcagcaactgagagtaaaaatctagtgagaactaggggattgataaagcattgtgtcaaaatagcgtataagtatagtttttactaaatgctaacgaatagaaatactcactaatttagaaattgtaaaacgataaacgtttgagcgttaattttttcattaataagcgttatatttatactgcgctttgcgaataatctgattcatggcttattttgtgattgaaaacagccagtatcatcgaacactggtaaaattgttgtctttgtttaccttcagtacagtgtctcatatttttgaatttatcagaatgcaaagagcgcaagtaacaagttgttatcatgaggcgttttaatgtcagaccgtaattttgacgatattgctgataaattctctcgcaatatctatggcacaacaaaaggaaaaatccgccaagcggtgatttgggatgatttacaacaattattaactcaactccctgatcgtccgttgcgtattttagatgcggggggtggtgaaggttatttttccagacaactggcaaaattagggcaccagataattttatgtgatctatcacaagagatgcttaaccgcgcacaagaagcggctattgatgaaggtgttgtcaatcaaatgacgtttatttgttgtgcagcacaagagataaaccagcatctagatgatggtgttgacttaattctattccatgccgtattagagtggatcacagatcagaaaaacgccataaatgtacttaccgatatgctacttcctaatggtatcctatcgttaatgttttacaatgcgaatggcattgtcatgagaaatgctattttgggaaatttccatttggcaaatccggaaataccacgcagaagaaaacgctcattatccccacaaaatccgctacaacctgaggatgtttatcaatggttagcgtcattttcaatgacgattttaggaaaaacgggagtgcgtgtttttcatgactatttgcaaagtcgtcagttgcaaaataaagattttccagcgttgcttgccttagagcaacgctattgtcggcaagagccctatatcagtctggggcgttacattcatgtcatggcacaaaagtgtgtaaattaaggatgtactatgagtgattttacccagaccgttcctgagttagtgtcttgggcgagaaaaaatgatttctctatttcactgccaccggaaaggttagcttttttgatggcagttgctgtattaaacagcgaacgccttgatggcgagatgagtgaaggggagttgattgatgcctttcgagaggtgtgtaaaggctttgatcaacccgcagaatcaatacaagttcgtgctaataatgccattaatgatatggtcaagcagcggctttttaaccgttttaccagtgaactggtagaaggtaatgcgatatatcgtttaacgccattaggtattggcatcagtgattactacattcgtcaacgtgagttttcatcactacgcttgtcgatgcagctgtcaattgtggcaagtgagttagattcagcggcaagtgccgcagaagaaggtggtgatgcataccattggcatcgtaatgtttttgcaccgttaaaatattcggtggctgagatattcgatagcatcgatttatctcaacgcattatggatgaacagcaaaatatcgttaaagaagatattgctgcactattaaaccaagattggcaagctgccatttcaaactgtgaacaattactatctgaaacctctgggacattaagagagttacaagacacactggaagcggcaggggacaaattacaagcaaatctattacgtattcaagaagcgaatatgagttcaggccatgtcgaccaaatagatactttagtctttgagttacaaagtaaacttgaccgtattattagttggggacagcaatctatcgatttatggataggttacgataggcatgtgcataaatttattcgcacggcgatagatatggataaaaaccgtattttttcacgtcgcctacgccaatccgtacaaaactatttcgacagcccatgggcattaacttatgctaatgcggataggctatttgatatgcgtgatgaggagcttgtgttgcgagatgaagaagtgaccggggaattgcctgaagagctggaatatcaaatgttcagtgaagtaaatgaacaaattgctcaatgggttgaacaagagctggctgcttataaattagaacaacgagcgttagatctcagttcagtattagttgagtatcttaatcgttatccacaacagaagcattttgatgtggcacggattgtcattgatcaagcggtacgattaggtgtcgcgcaagctgaacttgcaggattgccagcaaaatgggcagaaattaacgaatatggagctaaggtacaagcgcatgtcatcgatacatactgaacaatttataccagctaaattagcacaggcattagcgaattcactttttcctgaactggatagtcagctacgtgcaggtcgacatattggtatagactcactagataaccatgcttttttgatggactttcaagatgagttaacagatttttatgcgcgttataatgtcgaattaattcgagcacctgaaggctttttttacttacgcccccgttcaacgacgcttattcctcgttcagtgctttctgaaatggatatgttggtcggcaaaattctttgttatctctaccttagccctgagcgattagctaatcaggggatcttcactgtgcaagaattatttgatgaattacgcacactggccgatgaaagcaaattgttacgcttagttaatcaacgctcgacaggatcggatttagacctacaaaaactgcaagagaaaatgagaacgtcacttaaccgactacgtcgtttagggatgatttcgtttttacccaatgatacgcaacgtttttcaattactgaatcggtgtttcgctttggtgctgatgtgcgtagtggtgactctcctcttgaagcgcaaatgcgtatgatccgcgatggtgaagctatgccactagagcaagatagcgagccaagtgatgacgatgaacaggaagatgagcaattagagtccagtgaagatgatgatgcagaggaagaaaataaatgattgaacgaggaaaatttcgctcattaacattgatcaactggaatgggttttttgctcgtacttttgatttagatgaattagtcacgactttatccggtggtaacggagcgggtaaatccaccaccatggcggcttttattaccgcgatgatccccgatctgactttacttcattttagaaataccactgaagccggttcaaccagtggctctcgtgataaaggattatatgggaaattacgcccgggagtttgttacgctgttttagatgtgattaattcccgccatttacgagctgtcgttggcgtacgcttacaacaagttgccggacgagataaaaaggttgatatcaaaccttttatgatccaagggctacctattgctgaaaatccaacagaaattttgacgcaagctgtcgatggacgccaagcacgtgttctaccacttaatgaattaaaagaaaaagtagaagcgatagaaggcgttgtttttagacaatttaactcgattactgatttccactctgtactctttgatttaggggttattccgaaacgtttacgctcagcaagcgatcgggcaaaattctatcgtcttattgaagcttcattatatggcggtatttcaagtgccatcactcgttctttacgcgactatttattacctgaaaatagcggagtaagaaaagccttccaagatatggaaggggcattacgtgaaaaccgcatgaccttagaagctattcgggtcactcaatccgatcgtgatctgtttaaacatttagttaccgaagcgacctcgtatgttgcagcggactatatgcgtcatgctaatgaaagacgagtacaccttgatcaggctctatctttacgtaaagagttgtgggatcagcgtaaagcgattaacaatgaagcttatcgctttattgaaatgggcaaagagttagaagagcaacaagcgttatcggctgatttggaaacggattatcaagccgccagtgatagacttaatcttgtacaaaatgcggtacgccaacaagaaaaaatcgatcgctatgttgcggatgtcgaagaaatcacattccgtttagaagagcaaagtgaagttgttgaagaagcaacatcaaaaaaagaagagttggaagcgcgagttggatctgcggaagaagaagttgatgaactgaaaagtcaattggcagattatcaacaagcgttagatgttcaacaaacccgagctattcaatatcgtcaggcggtacaagcattagagcgtgcgaaagcacaatgtggcattgatgatttagatgaaaccaatgccgagctatgggctgaacgtattcaagcaaaaattcaatccatcacgcattcattactttctatggagcagaaactcggtgtttctgatgcggccaaaacgcaatttgatcaagcctataaattgatcacctcgattgttggggaagttgagcgtcaaaatgcgtggagtgcggctaaaagcgcattacgtgaatggtcatcacatcgtcatcaagccgatcgtgttcaccctattcggatgcaattagctgaattagagcaacgtttacagcaaagaaataatgctgaacgtcaacttgcagagtttaataaacagtatggcaaaaatgttgagcctgatgatctatttactctacaagaagagctagaagcaaagattgaagagctgagcgattatgttagtgattctggcgaacagcgtatgcaaatgcgccaagagcttgatcaactaaaacaacaaattgaaaaattaagaaaacaagcgccagtttggtttgctgcacaagatgctttaacgcaactgtgtgaacaaacgcatcaatcttttgaaacaagcaatcaagttactgaatatatgcaacagttacttgagaaagagcgtgaagccacggttttgcgtgatgaaaccgctgctcgcaaacagcaaattgaagctcaaattgaacgattaagtcagcctagtggggctgaagatagtcgattaattactttagcagaacgctttaacggggttttattatcagagatttacgatgatatcaccttagatgatgcaccttatttctcagcattatatggacctgcgcgccatgcgattgtggtacaagatctcagtgcgatcgaagagcagttagcttctttagaagattgcccggaagatctctattttattgaaggtgatccacaatcctttgatgatagcgtgtttaatgcccaagagatggaaaaagcggtacttattaaaagttcagataggcagtggcgctattcacgttatcccgaaattccattatttggccgtgcagcacgagaaaaccagctagaaatattatcccgtcaacgagatgagctgtcagagctgtatgccacacaggcctttgatgtgcagaaaattcaacgtgcacaccatgcatttagccaatttgttgggcaacatatttcagtggcatttgatgccgatcctgaagaagatattcgccaattaaatcaacgtcgtaatgaattagagcgcgagttatcacaatatgaagagggcactcagcaacaacgtcagcattatgcgcaagctaaagagtcgctcaatttattaaataaactcattcctcaagtcaatttattattggacgaaacattaattgatcgtgttgaggagctacgtgaagagctttataacgcagaagagtcgatgcgttatttacagcgtcatgagaaagcattaactgcgttagagcctatagcctcgattttacaaagcgatccacaagagcatgatcaattaacacaagattatcaatacgcaaaagaagagcagcaacgttatcaacaacaagcatttttgctggtggaagtggttcagcgtcgtccacattttagttatagcgatgcggttgaaattgtcagtgaaaataacgatctcaatgaaaaattgcgtcgtcgtttagaaatggctgaaacagagcgagcgacagcgagagagttatatcgtcaacagcaggcacaatgtgatcagtttaatcaagtactagcctcactaaaaagttcttttgatactaaatcagaactattaagagagcttgagcaagagatgaaagagactggcttgcaaattgatgcgggtgcagaagcgcgagccaaagagttacgtgatcaacgttatgctgcggtgagtgctaaccgtacgcgtattagccaacttgagcgtgatattgcgcttagtgaagctgaacgtgaaaatatggcgaagaaaattcgcaaattagaacgtgattatggccaaatgcgtgaacacgtcgtcagcgctaaagccagttggtgtgctgttatgcgcttagtgaaagaaaatggtatggagcgccgtttacatcgtcgtgattttgcctatctttcagcggatgagttacgttcaatgtcggataaggcgctaggtgcgttacgtcaggctgtggcggataatgaatatttacgggatgcattacgtcgctctgaagacgcaaaataccctgatcgtaaagtccaattctttattgcggtttaccaacatttaagagaacgcattcgacaagatattatcaaaaccgatgatccggttgatgctatcgaacagatggaaattgaattagctcgcttaaccgaagagctaaccagtcgtgaacaaaaactggcgatcagctctcgcagtgtggcaaatattattcgtaaaactatccaacgtgaacaaaatcgcattcgcatgctaaatcagggcttacaagcggtttcctttggtcaggttcgtggtgtacggttaaacgttaatattcgtgaaagccatcaaatcttactggatgtattatcggaagaagaagatagccaatatcaagatctatttaaaaaccaaaacctaaccttctctgaagcgatggcaaaactgtatcaacgcttaaatccacaggctgattttggtcagcgtatgccacaaacggtgggtgaagagctacttgattaccgtaactatcttgagatggaagttgaagttaatcgtgggccagaaggttggttaaaagcagaaagtggtgcgctatcaacaggtgaagccattggtacaggtatgtctatcttagtgatggtggttcaaagttgggaagaagaatcacgacgcttaagagggaaagatatttcgccttgtcgtttgctcttccttgatgaagcggcacgtttagatgcgaaatctatcgcgaccctgtttgaactgtgtgaacgacttgatatgcaacttatcattgccgcaccagaaaatattagtccagaaaaaggcacaacttataaattagtgcgtaaagtctttaatggaagcgagcatgttcatgtggtcggattaaaaggctttgggcaacaaagtgaaaaagataaacatttatccgaaaatattgcagatagttgatgaaggatcatgatgagtaagtgaataaccttataatataacttattgttttcattattttatattttggttattcatgagtgttaatggcatttagtatttttatcaccgttattagtacaaatcagtgtacaaattttatagcgtgacccctcaataaaaagggaaatactaaatgcctctcatcaatttatatcgatgttaaaataatcaataaaagtggaaacagaggatagcgacaggtttgagtggaacaaaaacatgtgctttaagtcccattgattatttacatccctcatcgcagtattgctgtatttcattgagtaatctgcctacatggaagccatcacatacggcatgatgcacttgaattgctagtggcatcagaactttatctccttgcgtataatatttacctattgtaaatacaggggcaaagaaattgtttatattcgccacattcaagttaaaactggtgaaacttacccaaggatttgctgacacaaaaaacatattttcgataaattcttttggaaaataggctagatcgtcaccgtattgtgctatatcttctgaataagttttcaaaaaatgattgatatctttgtggtagtaactccataaagatgaaaatgtttcggtctgttcatgaaagatagtatacccagggttaacactatcccatatcaccaattccccgtctttcattgccatgcggaattctgcatgtttatttaccaataggctaatgatgtatataaatgtcggatagaatttgtacccattttgctttacggtttttaataatgaagtaatatccagttgaacggtctggctaaaggtgcattgagcaaaagactgaaatgcttcaaagtgttcttttcgtccccattgggatagatcaacaacagtatatcccacgcgctttgtgtccatattagctttcctattttctaatccaaatttaaattaattgtatattacttataaattattaaaacaatttcgaacctctatctgtagataaacccataacctatgataggtaataggtttttcttggctaattttaaaatgtttattttttaccaaaaaatgtttcaaaaataacagagtcattgatgtgttcatttgggaacgacttagataataacggcgctatctgctttcgtagatagtgctttcttttttcaaagtgttagatagatcaaaaaatgaaagtaaactaacaaaagagtaccagcctaaataaaataacgtgcgctatatctcatttaaatgtaattatgatgtttattattatcaccttctgtgattaatataaaaattaaaggaaagagaatgcgtaaagttacacttactcttagtgcaattgcgttggcgttaagtttaaatggcgcagcaatggcaaaagttcatatgccagaagttgttagcccaggggttactgttactgaacttgcacatcagcaaccaattaaatgggtttctgttgcagaaattgaaaaaagcttagaaggccaagcaccaatggcggtaggttttgatattgatgacactgttctgttctcaagcccaggcttttatcgtggtaaactggaatattctccaaacgatttcagttatctgaaaaacccagaattctgggaaaaaatgaacaacgaatgggataaattcagtatgcctaaacaagtcggtatcgatcttgttcagatgcacttaaaacgtggtgatactgtttatttcattaccggtcgtacacagactaaaacagagactgtgactaaatatgttcaagaaggtttaaatattcctgcagacaaaatgcaacctgttatttttgccggtgaccaacctggcgcaaataacaaagtaagctggatgcgcgatcacaaactgaaaatttactacggtgatgcagatgctgatatcgcagcagctgatgagctaaatatccgtgggatccgtatcttacgtgctgctaactcttcttaccagccgttacctaaagcgggacaatttggtgaagaagtggttatcaattcagagtactaatctgtctctgtgctgttgacctttatttgttaggcgtaggaaactacgccttttttattttgggtttctttataaaacaaaatagaaccatatgatagattaaatctatatactttatactttctatttgaatatttattgtgcacggcattgtgagtatttagtatttatactcttatttaatataaaaagtgtattaaacatctttttatgatgatttaagtgcctattgttgaaaagattttataaaactttacaaatattagtttattcctataaaactctttgtctaactcatctaatattttacgatagcaaaataataacaagggatgaggcactgaggactatggcgcaacaagcaattaaaagagcaataacgtattcggtcgtaataggtacacttctctcagggcataatgttattgcctcagaaagtgaaacaccaccgctattcacatcagaaacacctgcattagtacccgcattcacagaagatgtggcaacacaagatacattaaattcaccatcagtgagtaagcaggaagttagtactaaactacaatcttggttaccaagcgaatataaaccactttactttaagcaactcgtggatgtttatcaaagcaatgatttagcactgatttggcaagatgaacaaattacacaacaactagagcagcaattggcagaggttgccttaactggaattcaaccacaatttggacgttggttaacgctattagaaacagcacaattaacgccagaagcacgagatattattttatctgacgcttttttaggttatatcagctttgttgaacagattaatcaatcaggaacaacactgttatatcgcgctgcgatacaagcattaccggcaccaactgtgcaagctgtcgagcatttccaactcaatctacaacaaaataccttagggcgctttgtcgtctcctttgcaccctcacacccttactatccattaatgaaagaggaagtgcgcaaacagcttcatcaagaggttatttggcccgtcatggaagggaaaaattcattaaagccaaaccaatcggcagaagaagttattgcattaagacaaatattgcgtaacttaaatttactgcctcaattggctgaaagtgagcaagaagtagcaacaacgatttatgatgcgcctttaattgctgctgtaaaatcgtttcaagcggcccatggattagaaactgacggtattattggtagacagacgcgtaattggttaaatatgacaccaatacagcgtgctggaattatggcattaaatatacagcggttacgtttaaccccacctattggtgacactggaatttgggttaatattcctgattactccctctatttttatgctaataatcaactgattttagattcaaaagtgattgttggtcgaccagatagaaaaacccccattatgagtagtgcgcttaataatgttgtggttaatccgccttggaatgtacctacgagtatgacgcgtaaagatatagttccaaaaggaaaggctgatcctagttattttagccgtaaaggttatacgatttattcagggtgggggaatgacgcctatccaattaatccttacgatatagattgggaaaacatctctgcggctaattttccatatcgcatttggcaagcccctgggccaactaactccctaggtcgatataaatttaatatgccaaactctgaagcaatttatctgcatgacacaccaaaccacaatttatttactaaaaatatgcgagcaattagttcaggttgtattcgtgtgaataaagcggcgcaattagcgacgatattattaggtgatgcaggatggaaacaagatagaattgatgcagccttaaaacgaggttcaacacaatatgcaccaattccagaacgtatccctgtctatttatattatcaaacagcttgggtagcagaagaaaatgcccctcaatatcgagcagatatttataattatgaccaaagcattaataatgcaacctcttttttagagaatattaagaaatatttgtaatagaacagatggctaacaacaataaagagtaagtattatgcttgctctttattttttataaaaatcagtaagataaaataattttattcagttttattaataaattttaaaaaatagctattatttttaatctatttttagaaataacattaatattaatattaataaaatgttaattgctaacacggctattattaataataaaacataaacttttataaaataatatcaatgatatgtttacaaatctatacaaacaataagcaacaattcaagaaaaatattgtcataataaaggtctgttcttccttctatcattattttgagtgtagctatcatggatattgttgattcacatcgtcgtaagtggttaggccttggtatggctgctgttggtttaggtttacttccctcacatgcatttgcatcattagcaactccccgaccgaaaattcttcgctttaataatttaaatactggtgaaactattaaagccgagttttttgatggtaaacgttataataaacaagagcttgctagactaaatcatctttttagagatcaccgtcaaaataaagttaaaactatcgatccagccttatttgatcaaatctatctgttacaggtgatgttaaacaacaataaagccgttgaacttatttcgggttatcgttcactcgcgactaataatcatctacgtcaacacaccagcggtgttgcgaaaaaaagctatcatacccgtggtcaagcaatggatttccgtttagtaggtactgatttatctaaagtacgccaagtagcactaagaatgaaagcgggaggagtgggttattatccacgaagtaattttgttcatatcgatacaggacccgtgcgctcatggtaatctatgtaataaataaatagatatagattaagaaagcgcggagtaagctatgatgtatcacattatacctgtgacaaattatatgcaaaattgcaccgttatctggtgtgatgataccaaagaagcggccattgttgatcccggtggtgatgtcgaaacattaattgcagaaattgaacaacgtcaattaaagttgactaaagtgctattaactcatggtcactttgatcacgtagcaggaacggctcaaattgttgagcattttcatgtgcctgtttatgggccacataaagatgataacttccttattgaagatttagaacaacagtgtcgtatgtttaacttccccagtggaaaatcttttacgcctgatcaatggttaaatgaaggggatactgtcactattggtaaaaccattactttgtcggttttacattgtccgggccatacacctggccatattatttttgttaatcaccaaaataaacttatctcgatgggagatgtattatttcgtgaaagtattggtcgtactgatttccctcgtggtaatcatgccgatctgattgcctctatcaaaaataaagtattaccactaggtgatgattatctatttatccccggccatggccctatgtctaatttaggtcatgagcgtcaatataatcctttcttacaagatgaaatgcccatttggtaatttaaaataaagcaaactctttaagccctttatattaaagggcttttttatagataaaaaattaaaaatgatatcgctcatcgtcggtaaaattaaatatttttgctgatactataacctgatgttcctgcacaaatatggttccaagagatactttcatatcgaatagtaatatcttcataaggctgggcatctgcatgcgtcagtgaattagggtaatgtgctgatatattggtaatgctggcttttgttagcttaatggtataaaacttttcttgattgccgtttgaacttgttctatagaattctagctcgcactctaataattcattatttgttattgcaaccccaagtaagggtgaagatttatctataggttttgaaattaccacaggagaatgatttaaattttgtgctcgagttaaatcataatcaaatgaatacacaaatatctgatcttcatgtccgtgctgatatttattgcctatagatcctaaagtagagcaccctttggatatatcaccttgagatttccctattatctttaaatatattgaattagccattatttataactcctttttgatatttcttcatatgatattatcaactttataaacacttttattatgtgccatagttaatactactaattattaaatcattgatttatagccccttagtggtgagggagataaataccaagtggtgtttttctgatcgttgagtgtaactgacatttccaataacatattttcagataaacagaacgggaaaaaatggtaaagatgtgtagtaaagacaaaagcttcacctctattttcatattgtgtttcgtcaatgaatagcgataaagataaacaacgatagggtttaccttttaaaatatagtcatataaatgtgtttttagttcaacgagtccatttaataatcgctcacattttcgagtgatctgcctatcagtatctcggtaaagaatataatcagaaatcatatgtttaatagtatctaatgacattaacattgaaccattagcactgtaatgagataacaatttccaaaaatggtgattatttacaataggtggataacaagatgataataatgtgatatttcctgtttttactgcatcaggcattttttcgctgtgtttatttaatagacctaactcatttcttttatattgttcaaagccaatataaacacatgcaaaatgtaaactaggcggtgtgaccataggatcacctttattatcaaagaaattcaaataataaagtgtatgcccagtaatatttttctccattgttaatgaatagaaaatggctttatgaaattggggcattaaacgagaggcggcggttaattctgtcgtaggataaaaatgacagtatatgccacgcgctagctcatgaggctctagtgataactcaattttatcaagatcggccaaatagtgatgggttggaatagggagtaaataacttgatttattctttttaaaatcaattaaaagtgtatgttttgcttcactatcaatcgctggagcacagtttaaaaaaaagctctgattacactcttcttgagttaaaggaagttgctgactgaaatagatattcacaacaaaccgctgctgttgtttccaatctaattgagtcactatttgtggtatatctaactcaataaaatggtgaacatggggtaaataaagaccttctaataaacgttgtggtgcagaaaatgagttatttttctgtgggaagattttatagtcattgccaattttgggttcaaaagcataattaagaggatcgccttcataacgttcaccgttatgtaccacctcaattttttcaaaatattgactaaatgcgagtaataaaatgtctgaggtggttttattttcccctaaaaaaacattaagtgcatttgtttgagttaattccacatcaccacgatataatatttcaagagagatacaagagcggtttggatgctgagtaatttttctatccaaaatgctataaggcatgatggtgaaattatggcagaaactaaattgtgccccgttgtcgccaatcaccaaatgtttttcattaatctccatgggataggggagaatttcactttggtcaatttggataattgttgttgatggtaggcctttaatggcttgggaatttagtcgttgcagtaggggtaatgtgatctcaggaaaagcatcatcaattttatcttgtaaacgagcagataaaaaagcaaagccttctaagagataacttgtttgtggatcttgaggatcaagtacgctcgctaaatgtggcgctttatctgcatactcactgaacagtttttgtaagtactgcttttctttaatatatttaatttcactcatgatctaatccaaaagatgaatatgagccgggttttaaaccttgttgttcagcttgtttttgtaaatcataataacgagctaataacccattaattttattatcaatattattaagagttgcaggagaaataggttgccctgtttcaatttgtacagcgagttgtcgcagtttttcttcgattggctcaactttattgtgctgtttttgaatatcataaattgccgtttttagataagagagtgtaaaactgcctctatttcgttcttgctgaactattttattagaaagttgttgtaataatgtcgcggtttcagaccagctatcattaattggcatattctctaagcgcgtttgataaagattttgccaattacgtgtaaaataaatttgctctgcatctgtaggccaagcgtttttggctttttcttgcatcgtatcaattagccgtaaattagaaagaggagaacgtttttctaataatgctaaatgatactcgtagctatttaactgtggtttaaacaaccatttggcagccgcaccttcaggtattgaagtaatcgcattcatctcttgttttaaatagagatgtacaccaaatccgatagctaaaaacagtatgcaactgagcacacagccccatataaaacctcgggtcgcactcattttttttgctactacagtgaaagaagaggcgggttgaggtgtttcaatcacaaaagtgggggctgctttgtccgttgttttcgacggttgttgaatacagactaatggcggtacgctaacgggttcggcactatcttgttgcgtctgtttttcttgcttttcaatttgtttggctaagttttggaaaaaccacagtaagttttcaattttaggcagtttttcccaagttgttttagccagtttatcgattattaactgtaacgcgcgctctgaacgatagattaatcgtagatcttttgcttgataggattgttgtcttaataaagcgctggctttggtattaaaccagtttaatacctctgtacgttgatttggcttttccggccacaggctatcccaataagtcacaataacatttgctaataactcacatccttcagtaaaaccgcttaaaccatgctgttgtaatcttgcaatggtatagtaagcaccgctttgtaggtcgataccatgatttttaaatagggataagcaaagtgactcaataagtgtccaacttatttctggtcgagcagggtggctcaatttattaaattcggttttcagggcaataaattcaggggtatcaagtggagatcccccaattttaatcactaaactttctgatttcatcgcactcaacatccttttattcccccactataaagtgggggaaatcacattaataaagcgtttcaggtaaacggaattttgtgaataatccaccgaagaaaggattattagattcatcaactataactcgataagtcatatcaccaccgtcgattgtgaagcgaatatcgaatgagttagatttgatattgatgagttttgcattatcaactaatcgcatttgtgcccatggcccagagaaactgattgaacgtggcgatttatcaccggaaagaggcactaaagtcagtttactttcaatattggaacgcattgagtttggccataccaagtgtgtcacatggctgcgactatgagcgtaatcaatcaattgtccatcaagatttaagatgctacgacgcttattaccacttaatgacagtggctcaatagcatattgtgcttctaaattaccttgggcattaaagaaggtttctctaatacgattggctatttcaatttgtgctaatacatcagcgcggatcaatgattggctatcactatcgttaactaagttattctcaacgaataaacgcagattttgttgatagaagctatctaatgttccatttggtttgaagaaacgttcaaattcacttaaaggaacatcttgtttagctgctgggttaaatggatagcgaccggcaatataagtattgtattgtttgacaacattttcattccattctacttccatataacgaatagcttctttttggaccacattccatgcttgcactgataactcatcgacccagcggttaagcggctctggtaatgttttcgccatttgtgatagctcaaaaatagcgtcgcgattattatcgtttaagcgcatcgaaactgctttaagcgccgctttccccggcactggagagttttggatccccaataggtaacgatgtaagtcatttagtttttgattcagattctgtaaattttccccttggttactgactaatatctcagtttgaggagtaaattcgcgatctaagcgggttaataaacggtaagatggctcagccatcagtgttttttgttcatcaagtggtaaattttcatcaatagttggaataaccgtgttatcacgtagaacttgtaatgctcggcgtaatggttgttcaccactaataatttgctcaagagcggtaatttcatcttgtattgaatcaaattgacgaatttctaaattgctcatggcattacgccattgagccgtatagtcactaagatattgttcactgatttgacgctgaatttctttacgatcactttcactatattgtgtgttggtggttagattaagaacccaagcatcaagtaatgttagctcgaccaatttatcattttggcggataaaatagtttaataaccctgagcgcgttaagaattgtggaatttctaatttatcatcatcaatagccgtaaagaccgtattaaaacttgggccaatttgatgttgtaaatttaaaggcgctgaaagctcttgattagcctttaagcgtaaggcttgatatacacgctgataaagtgacaatacacttaactctgcttgtgcattttttataggtccagcaaaaggcataaaggctttagtggctgaaacaaatcctttttcacgctcttgtttccaatctgtgtgctcaagggcatagcgcaaatgggcttttagttgcagttgtttttcacgttgaccagtgaacagttggctccaataatcggccataaaatcttctaccatgccattattacggccacttttatcttctaacatgcgcataatacgcaatatctctaacttatcttcacttcctttgtcggcactgttaagttcatttaacaacccagacataaccgcaggtaaaaaacgatcggtgagtagttgtaaatagacttgttcaacttgtgggccaactttttgaccttggtaaagacccatatcagaaaagagcacatttttatcacgatgattaccataagctaaggttgcttcacgtaatggattgagcaccggtaattgtaggctaccatcagtatctttctgagcattgttctcaatagcacggaatgcttttacctcattaagaacgttttctccagcacgatagtttttgtcgtaatagtggctccaaccattccaaattgcgattaagccgacaaagctaacagcagtggtgactaataggcgagtccgatgttttttaacccaataatggttttctgctgcaatattaggctcactaaatagcacttgactaaataattgggtagtaaaataagggtggctatcattaattggccatgtagtaagaggtgctgtcggtaaatgatattgttcggacgctgtttggctaaacacatcatcgatttgaccgatttgcaatgcagaagttaaataaacccctcttaaacagatattatgttgctcattattgatgagcaatgcatcaattaatgtgcatacagaatgttgtaacccttcaatttggcgcacgaaactaaatagatcactacgctggttaccttctgctctttgtagcatcatttctggtaatgcgctgttcatttggcctacccattgtgaccaaaaatgatttaattcctttttccaattactttttgctttctggttgaaagaaacacctagtacttcattacgttgttgaacatctaatgattgatacattgagtcaaaaccacgtaatagatctagcttggttaagacgatatataaaggcaagcgactattaaatgtcatgcgtatttcttcaatacgcatttgtaaatcagcaagtagctgactattttgctccttactattggttaataacgatagggtatcgacagttaagacgatgccattcattggttgtcttgggcgattagttttgatccaattgagtaaatcgccccacaaacggtgataaagttgaggtttatcagcctgatttgccggctgggttaatagatcaccattagggacaaaaagtacagcattgtcggttaatagacattgaatatttaatgcaatattttgttcgttaacaatattgtcgctaggcgcaatatctaatgggtttaccgtattttttaataagctatgctttccactttggttagcacctaaaacaaaataccaagggcgtaaataaaccgctttagtatgaccatttaagtggcgaataaattgtgatttccaatagtttaaataacgtttttgaaaatcaagatcttgtcttaccggatcaactacagccaattcgacatcaagttttaatgcttccaattttttaactcgacgccatgttgctagaccaatccaactcacaacaagcaatacaataacgacggttgctaaccaacgtgtggtgacctcgctaaacggtatggaatcttgataacgaaatgttggcccccaccaccagatccaaataatgagcaaagcgggaagtaatgccaataaaaatagcaaaaaggaggcaattttagatttatcagcaaaaaagagtttttttaccgaactcgtaatgtttgaaatggagaaaaccggtaatttcattattattgatccctatccatagtcattgttatttctgtctttttgtctattttttgcatgagttgtcgtattaagttgggttcccaatctgcaagtgaataatgtgaggcagaggtattaagttgttggtataactgtgtagccatataatccatacctgacaattcaaatagttgtgcagacaataattgtccataaaatctatctctaggctctgatctgctagcaaggtttaattcaataagcttcagggctgcttcaagaccttgttgctcataacattgcaagacctcttgctctaggattgcagtattcgtattcgatggtggcaattgaccgttttcagtttggttatattgctctaaccactgttgtacactttcaggaaagaagggtgtcatatccgaaaagtgcaagttaacaagttcaggaagacgcgctaaaaaaatacgtaactcttcaataatgccactttctacttccccataacctaatttagctgctacttgtgcagctaacatatggccttctaaccagtaaggagagagtgagagactctgttcaatattgtttaatagcgtaatggacgcttgagtcagttgagctttgtaatccattacacggtcaattgatacgggggctaaaggcgttttaccttgagcattagcttgaggtaagaccgtaatagcgtgccaaattgcataacgccgtatacgatatcctactgaactttcaggggcttgttggcagataacatcagctacttgaagtaatgtttgtttccattgtctttcatcttgatggttaacgttaatagttggtgttaagctattttttgtcggtgtttctatagactcgctaaccggcggagtctgtactttttcttctttctcgacaggtgaagcaacaataatcggcgcatcgttattttcaatacgattataatctctgcttaaatcatcaatttgttctgcaagtgccgggctttgttcatgccaaaattgcgctagaaaggcgaacgagcctagaatatcatcacgcatcgcgctgttggctgcatgacaaaaactctcactcgctgtttcaaaacgtttcaaaacttgattggctaaacgtgatttcaatttcatattggttgggtagcaactttgccaatattgacgattaaaatcagttaggatctgtgctgccaatactaattcttttggctctccagcatgctgtaaagtacgtaataaatggactaagatccgaaaatctttagtctgcgtttcaaataggtgtaaacagcgacgctggatctctttaatatctaattgaccatgactaagtgagccgaactttatcatttcactgtcaatatattcccagtcggcatcattatcattgacagcactactgacttgctgttcatcaagtgctgtcagtagctgttgtttccatgcataagaagtattgttcatcatgatttctaccagtggcaagccgctcttaaagggattatttgttgtgaaatacctgaaatattgaaggtgagtttttcgttattagataatttcaatgtcaatctttcagcatttaacaagcgtttaatttcatctatgcccggtataccgcggcttgattccaatacataaccgttttcacgtaaaaaccattctgcagtaaattgtgttttatccgttgaaaccatcacactgccagcatcttgttttgttggcaggataatttgcatccgagtaatgttatcaatacagctcagcattaagatggggcgaggcggttgaaagccaatcgctggaatggtcattaatacgggataatcaccggtttctggtactgagacgagaaaacctgcactgtttcccgtccgtttcatttcatgctctgttgcttggcgccatgttttacccatttgagtaacatcaggcagtgcattggaggaagatgttgaagaaagcgcaattttgtcataacaatctaaacgaattagctgagatgattccaaacggcattgagttaattcctcaatcattttctgattaagattattttcggcctttcccggtgaagtgaagagtaaagggagtaatgtgcagaaaaagattttcaatacgttcattttatactccgtatttcttcaatttatatattaacgctcgtttagaaatactaagctgttctgccatggcgttaatatctcctttcaattcttgctgtttatctaataaaatttctttttcataattttctatagcaacttctaaatcattaactcctttgatttgtatggtaggaagtgcaatagtcgctacagatgcggttaatttatctaacgtttcattaagcgtggtttctttttccctttgtaattgattgatatattgcaagtaagagattttttgttgcatatttgataattcaaaaagatgctttaattgatgattaaatagttcacaataaatagggaaaataccttgctcgatattttctagctcttcagcttgccctaaaagaataatcgtgccacatgctttatggttaacatcatagataggcaaactatacaatccggtgttcaccggaagctgtgaaataaaaccgcgcatagcagcattattaatataactaccttgttgtaagttttgccaaaatacaggttcacccttaaatagcagttgaattaaagggtgatctgcatcggtaatatcggtatctaaaaaatggctttgcacttgaagcgttaagtcgatattccaactttccaatttattttcagctttattcattaacgaaataattaacccactcagtgagctacgaaaaaagctatattttagaaattgaacagctagcgtctctacatcatgacattctagtagtgcaagcgcattttttagtctcgctttcattgcttaattaacctccgcaataaactcatcattttcagtcgctaagcggatatgagagatagcttcattacgtgcactatattgtagaagtaataaagaaagaggcggcaataacgcaccatcaataatagattccaaaatacgcgcaccattttcagcacgagaagctctgcgtaaaatttccgtagcaacactctcttctacattgatttctgcgttgaaacgctgttttaacaggttaataagacgagctaatttgccatcaacaatttgtcgtaaaacctctgcaggcaacggtaaataagggatcacttccattcgagcaagtaatgctggtttaaagaaagttgttaattcagggtagagtgcatcttctagttcgtccggtttatccgcgtaagcagtaatgacatggtcacctaaattagaggtgaggaaaaatgcgatatttttacaatcaatgactcgtccttctccatcggctatctctcctttatcaaaagcttgataaaatagatttagcacatcaggatgcgctttctctacttcgtcgagtaaaacaactgagtaaggtcttttacgaatagcttctgttaagatccctccttcaccatatcccacataaccgggaggtgaaccaataaggcgagaaacagtatgtttttcttgaaactcagacatattaatagtcgtgagatattgtgtgccaccgaacattaattgggcaatttggataaccgtttctgttttacccacgccactaggacctgctaataagaacgcccccagcggtcgacccggtcgacgtaaatcagcccgcgctgtgagtaaatgtttgtgtaaacattgaatggctaatgattggcctttgatactctcttccaagtaggtaggcaactcagtgacaattgataatgcatcttgtgataatcgatttaatggtactccggtccattcagcaattaccgccgcaatttgttttttatcgacgtgaggcgaaaccagtaaatgcgtgtcgtgtaactgagcaagttgtttatctaattgttgtaactgttgctttaattcttcagatgagcaggggggctgtgctgctattttttcatcattatcttcagcatcttctgcttcactataagttcttatatcacttaccacttcattatttgcaacatcatttgcgacatcgtcattagtcgcttcggtagcattattaagtaatgttgctcgtaaggtaataatttgagatacaagctctttttgttgctcccatgcttgctgtaaatcagttgcttgttgctcaatagcacttgcttgtgaggctaacgtttcaagacgctcagaatgatcatctaaacctaaatagtgttctctttgtaatacatccatttccatattgatttggtggagttctgttttcaaagaggataatgcctttggtggcgaagatagattaatcgcggctcttgcacaggctgtatctaatacatcaatggctttgtctggtaattgacgtccagagatataacgttcacttaattcagcactggctcgtagtgcttcatcatcaataaagacatggtgggatttttcatagatactacgtaagccacgcataatgataatggcttctgcagatgatggctctttgacttgcactaattggaaacggcgcgctaacgcggcatctttttcaaaatattttttgtattcgctccaagtcgttgctgcgatagttcgtagttctccacgcgccaaagccggttttaataaattagaaacatctaagccaccttgctggttacctgcaccaatgagggtgtgtgcttcatcaataaatagaatgatagggtgaggagattgagtgacttcttgcataatgcctttaaagcgtttttcaaattcgcctttgactgcagcacctgcttgtaatgcgcctaaatcaagagtaagaagttcacaacctcttaatttatcaggaatatctccggcaataatacgtagtgctagtccttcaattaacgcacttttacccacaccgggctctccgactactacaggattgtttttacggcgacggcacagaatatcaatcattaagtcgatttcattatcgcgacataagaccggatctaactcaccatttcgcgcttgttcagtcatgttatgagtaaatttcgctaacaatgaatcagcggcaaggttacctttttctgatactgttttttcgttaaaaggcgattcagcagagccttcagtccattgatcaaaattgagttttaattggtcgcggttaatctgcgcaagcatatcggcaacaggtttcgcaagataacgcaaaggcatttgtagtaaagttaaaaacaatgcaccagagcgaagttcactgtgatttagctcagttgacgctaatagccagctatctttcatccattcgactaataagggtgaaaaactaggataactttgtgtaataacttgatgtggcggaatgtcgatatctaataactctgataacgcattaatatctaatgcgcttttttgactgatcatacgaatgtcagttaatggcgtttctatcagtttttgtagaaactgagcaatcgtaatttcaggttgctggtggcttacacagtaagcggctgcactttctaaggcatgcttagctattgggtgtaatcgattaacgagagtagagagatcaatttggatcataatgcgtcctagccaagtaaagtattaagttgttccacaatactgagtgtttgataattcagtctggatgaataaatgctataaataatcaacgcgaataccgctgtacctatgagaatatagcgagcccctaaacgcttacctaaacgataacggctttgttggttatcacctttttcaaatagaactattggcttagcgttacctcttagctgttggatctgtttttgtaagcgtcttaataaatgattaaattcatcattttgtcccgcagagactttgtagcgcccgcggtatcctaggcataaacaaaggtagataaattcaatcagatcgaggtaacgcttaggttcacctaataatctttcaattaagacaaagactttttcaccaccccatgattcattatgaaaatgaaccagtaatgattgttttacccaaccattatcttgatcccagcctaatccaagggcggtttcatcaataaaagtacatagcacataacgaaatgaaacaatggcacctggctcgtaaccttggatctgtaattgttgctcaatagaggtaatatccatgacaacttgttggtacagcttttctgaaagtggggtttcagacatcgctttcatgcgcaataccatgcctaataaaggtgtagcagcatctatcattggattgatgttgtttcctcttagcggcagttggtaatttttctttgtaatgcgctcttcatcatcatgattcagtaaaatatcatcagtcatagagtgctccatctcttattgcccataactgaatatcgagatcggggaagtttcctgaaacgtggaatgcgatgttgccatcctgctggatccctttccattcattgccttgttgatcaaaatggaaatagttatatcccgagtgataaggtaattgtcttggtgcagccgaaagtggtgataaaggaacacccggtatttgcacactaaccaagctgcgaatgttattgattgttgtcaccttagtttgttgtgggaattggcgacgtagttgctcttgcggcatttgtgatttcaccgcaataataaattcagctcgttgtagcagttgtttgtcatgaatggttgctacacgaataccatgctcttgaacttgtagcgggattgggatcgctcttggtgttaagacaacactgagtgcttcgcggatactggctattaatggaatataactttctgttaatttagcatgttgatatttggcaatattttcaggtaaacgtgaagtattcgtgaatgtttgtagttcaccacaaagctctaataaatctcgaaatagtttttcaggatggatcaccggctcttgagcataatgcgaatagagtggataagtgcgattaagcacttgtaacatcataaattctgccacatccgcaacaccttgctgacctggggcaccaatgcgagaggcaatttgttttcctctttcatatagcgttccttcaagctcggtgagaaattggctcaataatgttgaggcacggatatttaataggctgggaatataatcattatctagcgttaaattaccattagcattacgctctctaatacgacagataggtaaagcaacataggcatctaaaccatgtttaccttgtttgagtattggtgtgagctgtgcaacatgaatagcactgatatcaccattttcagtatgtaaatcacgaatattttcggtgctttcgctgtagcgagaaagtaaacgactaccgttatgttcagtggaaatttcactgacattctcgttcattaaaggaaaagctagataaataatactgctgtcactatcagtaatattcgttatatcaataggctgtggtagtaaatcttggtttggtatagagaaaatggtgccgtctggcataacaccagaagcttctttaataccaatacgacctaaagcatataaatcgtcactcaattttaaggtactaaatccccaaaagtgtgaaaaaaagttatttaaaatactcaccgtcatataatcttgatgacgttgttgttgttgaaaatgttgaggtttgataaatagcccttcacgccagatcactctatttttagttgacatattaatcatcctcttcttgtctaaattcgatttcattttccctaatgtgcactaataggaagtagtggcgtcctttaccacgcgctttgactattttcttccattctgctttatcaggatctgagtaataggcaataatgccaatgtaacggttagatgggtctaacgtcatagtagggaagggtttatattggccaggtaaaatggtgtagtcttgatggtcaatataatttttctttagaactttctctaagtcaccctcttttgcatctatctgatcatgatcaacagagccaaatactgaatcttcgttaagataaacaacttggatatttatcggcgcagcttcaccttcctgattaggattaatatagggctccgcaaggatggttaatgcaacggtagagggctgatctttcggttgcccaacaggagttgagggatctaataagattttccccattttacccgcggcttcaaaaggtttactacatccactcaatattaaaaaagagctaaataacagtaatattgagaaagttctaagctgcatattaagcttcctctattccttttctcagcgctctgtcataagcatggctgtatacttcatagaataatttttcaaaaccctgttgccgagatgaagagagttctttgtaatagttgttgtacatttcccaagcccagccatcattcattggtgtgttatctgaagctcgtcgatactgagaaaagcggtttaataaatgttcaggagagaatgctgccaacatggttgatagtgcggttgaaatagcttcttgattcgcttgataatgcaattggatgttgtgcaagctttctgttactgccgcaggtgctgaaagatgtacagggctacgttcatcggtaaacatcaacttcattgtctcttcatagccactattaagacgtagaggattatcttcaattgggcgtaattgcttatcttgtaagctttcttgttgttgttgcaaaatcagtaaaccttcaatagccgctttgacggttttacccagttcaacaagaaaatcattagcatgctgtgtatttgttaaattaaggtggatacctaatcccttcatcagagggttaaccgccacatgatcgacatcggtcatatgttcgttttcattaggtgtgattttaggtaaatcaataaattcttggaccatagtattctcttgattatctgatgtcggaaaggcagatgaatacgagtgggggtcactcaataaaggatcgtctgaagtagcttgtgtgtttttagaaattaagcttagattttcgttttctaaagcctgtagtggatctgttgttaatgcaccctgaacggttggtacaaacggaggctctttccgctcatttttgactgttgtatcaacatcaaataatgaatctagcggattatgatcttttgcgataatagactgaggcgtcatcgccatcatattttgtaccggctctccggtaagactaatattggtggcaataactaatttacccacttttatctgatcaccttgggtcagtctaacggcatcaagatgcaatggaataatcgcattattaatgtaaacaggacctgaatttacttttaagcaaaagtgttgatctttccaaaacaccgtacattgccgatcggcaatagcaccttcattatcttggattttccagtcacattgattgccactaccaatctgtccgctactttgagttaaagtcgcatttggcagataaccactttctagctgttcactatttttgatgctaaaagaaattgttggctgatatttatccatctctttattccaataccgtaatggtgacatccggtttctttgcgggttgacctaaaaagctttgccagcctaattggttgtgttgttggtgacccaaacggaacccttcggcttgcttttcagcaatgctaagacgtaaatcccaagctaattgctcatgaaaaatgtaagaaacaaaggcaactaatggtgcgaaatcactgccgttaggtaaaaaacgcatatagcgttctaaacttaattcactgatttcgatggtgcattttccattgcagtcatatatgtgtgagcccagactaaaattttcccctaataacattcgtgggcgagatttttgtccggattgatgagaaatcgtacctaacttgttttgttgtgattcaggaataggaacacggcgtgtctcccaaccaattacttttacattttctaagtcgaaacagtgagatataagactactaatcacatcagaagagcgacttggactcgccaaaagaccagcataagcgagcattttgctatggttgattttgatccgaccgcgattagctccattacctaatccaacgagagaaaacatatattgtgaaaatgaatcctgaccttcattttcaaagcaaatgtagtaacgatatttgcgccagatccgataaagtaacgctatcagacgatgattgaagatatcgagaaaagcggagataccttctatctgttgtgcatcttcccaagcaaactcatccagataatagcctggtaggggggactgacttccttgtaagcctaaaaaagcgacttctaattcatattgttcgacattatttttttcaatggaaatgacatctcgcgtcggaaatgcaatatttgaataagatttaaagcgaagaataccgctgtcatcctccatcgagttgacatcttgatgaattattttatttaacaattcaacgagttgataaaaattatactctgttaccgatgagccagcttgttccagccaacgatcgattacttcagtatgtgctggttgatttgtgctggccatcgataaacttccttattatcaaggttaataacttccaactcatgaaacatattaatgctggtatataaggtgaaaaattgagcgataacggtacaaaataggaataaacttccttctgaaagaaacgcattttgatgaacaactaacgttgtcttcagaccgcgaacaggaaggcctttgtagatatgctcaatatgctctgaatgtaaatcaactaatgcatctaggcgtttttgtgattgccttgcaacctgtgtgttataaacagacggtaaatcatagagttgtaatattttttttaatgaatcaagattgagcaaagactgataatttaaagataaattagttaattcagaccaatataatgttttatctaataatggatataaaggcagtgttggtgcgaataaattcttagcagataaagccccataaggcattgatgcactatctaaatcgatagaacgcgtcgataactgggaagcgatatagcggttagtacagttgagtgcaacagaaacggtttcttcacactgttgtaactgaggctcttgctgacgaacaaaagaaagtcgatgggaatagccgtataactgttcattttgacttatctttaaacggtaatagccatgattttgagtctgatggttttgatgataaaaactttcaaatgctgtataggtgatcggataaggtttagcatcattaggataacgtaaccctctaacctcattaatcgaaaaaatatcaaaacattcagtaagttggtaattaggacttaaaacatactcctcacttttccccgtcaaatttattgcttcactatcaataggaaataaattcacaataggggtgcaattaagtttaatactgtcgtcgtaaagaataacgccatcaggaatttctagatcaaaattgatcaccagtttgaattgctctgcttcgatagccaaaggaatgtcatccaaaccatgaatatctagaaagagaaaggcttcaggaaaacagaaaaactcttgcagtatacgatagccatcatagctatttttcgggtatggaagtaaggcatcctgcttttgaaaaccaacaggcgtaactgaaaagtgagtaagaggtagcgtatgtacatctgtgactaaagaggcactctgcacatgctggcttaataaaaaatagagctgatttgtagtaaatggcgcaccatttaagtaaaaacacaatttatctaagccaatattggcaagtggctgttttgttgctaactcaaatgttatttcaatggcggttgtttgctgcaaaatgttactgatttttgtcggcattaaccagaggtcgcgactttgactaaatcgacattgaaataacgtctcgtggtttgtttcctcactttgcacataaagtggagcggcactaaagggttgtcctgctgaaatttttgttgcgtgttggcactgagcataattaggatgatattcaacaatcgtcatgcttggcacagggcgtgcgtagtttggccaaagcatattggctaaactattagttaattcaggaaattgtctatctatttgctggcgtaaattacccgataaataagatagcccatccataatccgcgaagtatcaggatctttaacattgtgcgaaagcaaattaacaagttgcggtttttctttggcaacttgttcagtcagctcatttaagtattctgattcattggtaaagtaggattttgatgacatattaatgctatttaagctgatatctacggttattatctaaatacacattaaattcaataagttgctgcttattttctaaatcaataaaagcattaatattaaattgtaaagataaactatctgcatcttcttcaagaaatttcactacaactttgctgatccgtggttcatacgcaataatgcaactactaatgctatcttctaggtgagatttaaaatcaaccgtagattgagtcgcatcatttaaatcagggatccctaagggtggcgttccttggcaaccatcaggtctagcatttaagatgtaatttaaattctgttttattgattcaatgagtgtatttgttcgcgaacgatgggaaaaacctaagtttttccctcggatccgttcaaataagctggcgccagcattagcctgccagccataattggatgccatcaccgttactctttatcaagacgaccaacaagtgataattcaaagtttgcacccatatatttaaaatgtgggcgaacttgaatagcgacttggtaccaacctggatcgccatcaacatcaagtactttgatttcagctgaacgcaatggacgtttactacgaacatctgctggtgggttttcttgatctgcgacatattgcttaagccaaatattgagttcacgctccagatcttgacgctctttccatgagccaatctgttcacgttgcaatacttttatataatgagctaagcgattgataataaacatgtatggcaattgagttcctaacttatagttagtctctgccaatttgccttcaggagtatttgggaagacttttggtttttgaaccgagtttgcggagaagaatgcagcattatcactgcctttacgcatggtcagcgtgataaagccttcttctgctagttcaaattctctacgatcggtaactaaaacttcagttgggatcttagtttgtaattcacccatcgcttcaaaaatatgcacaggaagatcattaactgtaccgccgctttgtgggccaataatgtttggacaccaacgatattttgcaaaactatcattaatacagcttgctaataagaatgcggtattaccccataaatagtgctcatggtcttgtttaacattttctgaatagttaaacatttttacagggttttctgttggagagtatggcaaacgtaataagaaacgcggtgctgttaaccctaaataacgggaatcttctgcttcacgcagtgagcgccatttagtatgtgcagggccttcaaaaacagattttagatctttaattgccggcagttcagcgtagctattaataccaaagaaattaggtgaaacagatgataggaatggcgcgtgagccattgcaccaacagtactaacatactgcattaacttcatatctggcgcagtattgttaaaggcgtagttaccaataactgttgcaacaggttcaccaccaaattggccgtatcctgaagagtagacgtgttgatagaagcctgattgaacaatttctggagaaaattcaaaatcttctaataactcttctttagttgcatgaagaatattgatcttaatattttctctaaaatcagtgcgatcaacgagtaattttaaagaacgccatgaagcttcaatttcttgaaatttaggcgcgtgaagaatttcgtcaacttgagtacttagtttattatcaagttcaacaagcattttatcgattaataatcgattgatctgttggtcttcagattcactggcgaaaatattactaataaaagcagcaacaccttgtttggcaatatcgtatgcttctgtttctggagacatacgtgattgagccataatttcatcaagtaaagagcctgtagatgcgggggcttgttgctcttgagcttctgcatttagtgacatgaaataatcctctataaacattatttttgattagcagcaatatcgagctcttttagaagctgttcgcgagtttcttgattttcaagtagttcttgaagacgctttctaaaagctgggacattgcctagaggaccttttaatgcaactaaagcttcacgcaattcgagaagtttatttaattcgggcacttggcgagcgatactatcaggagagaaatcctgtaaagatttcacatcaagattaacattaagctctgaatcactgctttcttctaaggtattgcgaacattaatatttaaattaatgccagcactttccataacagaattgaagttgttttgattgactgaaatcgctttgcgatcttcaatgggggtctcttccgttttacctttcatatccccaacaatcaacatattcaatggaagttcgacttcagcctgagctccgccagtatttggcgtatatttaatattaatcctttctttaggggcaacactaccgagatttttcttactcatttaagttaagctccttgtatgagtatgcaataacttcttaattccataaataaaatgcctaaattaaaaattaataataaatttagagcatgcacttccctacacagaacaaaacaggctctgcgttaagaattcttttcccagtaaggtgtttaaatatgtttaatattgtacaaaatttattttttagttttggtcataatatacaaaattaacttagggtcaataggtaatttattatatgagttcttatttttatattaaataagctgagagcagtatcaatagggcatcttatcgggataagaaataagtttgactataattatgaaagctaacttattcggtggttactctaataatgagtatctaaatgatatagctaattgcaatataaattaaactcaatttaataaatatagaatatattaatttataaaattctgtgagctaagttcatattttacaattagtaatataatttcatctttttctagcataattacttattttatctattttgcttgaaaggttatttcaattttaggataagttagcttttactcattatatttgtatcacgatgatggatacatattaaacaagcctttttggatattggtgatgtttttatattttgctttattttcaatatcttatggttttttaagttaaggcgttaatcttgatttaagagcaataaagaggtttttttgagatatcaatttattcataggaatataacgtgttagaaaataagagggaataataggttttcaagccctttgtgacgctacatattgatatattaaaaataacatatatataacgagtatatgataaaaaataaaaacgcaatgaaactatttaggtgtgaattagttttttatggcaacagaattgcaaacataatacagctatatttggtttaacttaagggtatggtctgaaaaatattctgctttaataaatggatttttaattttttagtacgatgtatctcttatagtgagtaagaagatggtgctataagccaaaaaagactaaccataaatagctaaataactatagagatatctttattgttatcaaataagaggattacctatttcaatcaaggataaatactaatatggctcaaatagatctttaccctaatatgatatgaaaaatcttctctcaatattgctactgtaatgagtatcgcttcttaatttatactggaataacagcatatctttatcatcaataagcaaagaccaagatagttaaactaaaacttttgtgtctccctatccttattttctacttgttcattgtatagttttataattagcctccataaaatgagtattggtacgtaaaaataagactgaaatatacgcatattgagtgtgttaaataaaaatagtggcttaattagcatgatattttaattaaattgagcttaacagctaaatatattgaccaatttggactgctcatggagaaaggacagtataattcaatgtaattgatttttaatactttaaaatcaatggattatatgcgctatttttgatttaacatttccgttacaaaatatatttttatgtacatagtgtttcttgggttgcgagcaatttgtctatttattcatcatattttatgctgataaacactttttatgactgtttttacagcatgatatagcgatatttcaaccagtttacgctaagtgacttatcctagagagatacaaaaaaaacgggctgtttacagcatattgataagattttattatcctttaccgaagtcttaccgtgcgcactggctaagatgacagacatgactaacggattgtttttaagacaatcatttaatttaatttgtcgtttttgataaaaggatattgttatgccaactccttgctatatttccattgaaggaaaaaatcagggcaacatcactgcaggcgcgtttactgcagattctgtcggcaacatttatgtacaaggtcatgaagaccaaatgttggtacaagaattttctcacgtagtgacggttccgactgatccgcaatcaggccaaccttctggccaacgtgcgcataaaccgtttcgttttaccgtggcattaaacaaagccgttcctctgctgtataacgcattggcttccggcgaaatgctgccaaaagttgagttaaaatggtatcgcacgtctgttgaaggtaaacaagagcacttctttaccaccacactgactgacgcgacgatcgtgaacatcgattgccaaatgcctcattgccaagatccggctaaagccgacttcacgcaacttatcgaagtctccctctcttaccgcaaaattgactgggagcacactgttgctggaacgtctggtgcggatgactggcgtgcgcctctcgaagcgtaataccgttatgacgagtccttgggggctcgtccttattttgtattgttcccttttctttatccatttttgcatggaggcagattatgcttagcaaagatccgaaatcaacgcccattgacccggcatccgttttaaaagatgaagccatcaatcaagtaaaaaatagggtgcaatccaaagtgaacgaaacgctatcgacacccacgcaaaaggtggccgggatggcctcagcagcggcctcgctcacgcaatcagccagcgcatcggccaatagggtgacggctcatcccctgatccacggtggcggttttaccggtggacaaacattcgctgaaaaccaagcactccaagcggcccatggggcgttacttgatgcattaggcatggacagcctcgaaagtggtttggtgttcacttgcaccattggtggattgcctgacgacacctttcaagtcaccgaatttaatcttaccgaaggattatcctcgctattttcactgtccatcagtgcggtcagtgccttaccctttatcgattttcagcgccatcttggcttagcctcatcattaacggtcaaacgtgatggggtgttgatccgcaaagtcaacggtatcttagccggggcagtacaaggcaataccgacggagtgaaaacgtggtatcacttcgatattcgccctgaaatgtgggtgatgaccctcaatcaagacagccgtatttttcaacatcaatcggtgccgaccatcttaaaaaccttattggatgaggcccatgttaaagcggattgccaattctaccgtgaagatctacaccctgaacgtctctacaccacccaaaaacgcgaatcggcatttgatttttggtgtcgactggcgtttgaagagggcattaacttctggtttgaagaagaacaactgttttacagcgatgaacatatggggatgacggcgggtattcacctcacctataacccgcaggccgacaccgatatcagcgatagcactgccatgacttggcaatatggcgaatatttgtgtgtggatgaaactatccataaagacaacaactttgtgcgtccttcttatccgttgtctcatgaaaacaaaattgagcaggggggacagcacagtgtgtttgaaagttatggtcgttttcaattagacgatgaaggtcgacctctgacacaggtgcgctttgagcaattacgtaacggcagcaaagtggggcaagcgacaacaaactgttttgcgctgatgcccggcaaaatcttcaccttatctcagcatccccatcagccgatgaatgatcgctggcaagtgatcagcgtcagccatcatggtgtacagccactggcggacaatagcgggggcgaaggcacacaactgtcgaatagcgtctcctttattccgggcacgcaagagtggcgtcccccttatcgttataaaccgacggcggacggcgatgaaatggcgacggtggtaggaccaccgggggaagaaatctacgtcaatgaatatggcgccgtgaaagtgcattttcattgggatcgtcggggaagtgccgatcacagtgcttcatgctgggtgcgggttgccatgggttggagtggaaatggttatggtttttctgcggtaccgcgcatcggcacacaagtgctggtcagttacctgaatggggatatcgacagaccgataattaccggttgtacctatgatggtcgtaacgcaccaccgattaagttcccagagaataagacacaaaccactttccgtagccaaacccacaaaggggaaggttttaatgaactgcgttttgaagatgcgggcggtaagcaagaggtgtttcttcatgcgcagaaggatatgaatactaaagtattaaacaatagaacaacgcatgtacttgcagatcattttgaagtagtcgaaaaaaatcaaatgatcaaaattacacaaaatcaagatgaagaagtgggtgaaaataagaagttatttgttaataaggattatcagcaaagagttggcgctaataaaacatctatagttaaacaaaacattaaatatgttgctggggattcatttgaaattgtatgtggtaaatcaacattacaaatggataaagagggttatattcggatccgaggacatgaaatcataattgaaacatctggagatcaatatattaaagccgatggagatatcacccttaaagccaaaacaattttaggtaattaatcatgacaaaattattaactgataataaaataccatcacaaaaatcatccttactagatgagataatcgaaaggacagaacctcaacctttatcgggtgagccttcaatgcttccctctatccaattagcaaaaattgttagtaacagtaacgaaggtatttctattacatttaatgacaatgaacaacctattttagcattgagtttagcgccaatcactgaatctgatgtaggcaaaatatgtgcgatccagtttattaatggaaatcagaataacccattgatcgtagggatgatttattcaaataactatttagataaattatcaaaacaaataataaataatgcgacattatcatgtgttgaacaagaccaattacatatccaagcgagtgagtctattacgttacagtgtggagaatctagcttaacaatgactgctgatgggtttgttcaaattagggctctttatattgataactatgcattagccacaaatcgtattaaaggtgcatcagtacaagtgaactgaaggaagataaacacatggagttgataaataatgctaaacatacagttgctaaagcgacagtaatgattgataaagctgggttcgagtatctggttgttgtaataaaagcaacttatcatattccagaaaataatcagcttccacgtcctattattccatctcaacccctagtctattcagatatatattatggagaggtggggaaatctgcgccaatttatgatgctgactttgttttaaagaaacaaaaatgtgatgtaatttttaatgctaaggcatttgcaccgcataaaaaacctattagccaactgattatatctgttcaagttggagatatgataaaaaagatcgcagtttttggtcaacgtaattggtgtaaagaaggtggcctttataaacctggagtcgcagagccttttactgaggttcccttacactatggggttgcatttggaggaaaatattattacaaagatgagcagatatctcactctataaatccactgggaatagggtattttttatctcgaaaaccgaataataaagaaataaaaatgcctcaactagagtgcattgatgaacaaataaatacacctgaaagtcaaattaatcccattgcattatccgtattacctcgccattatggtgaacgggtaaaatatgcaggtacttttgatgaaaaatggcgtaacgaaacagccccctttttaccaagagactttgatgaacgttattttcaatctgcaccagctgatcaacaaattgattttcctattggcaatgaagtgattgttttaaacaatatacaccctttgcgttcgaaaattaattttaaactaccaagattaaataatatcccagtaagattttatcagcgtcaaggggaagtcgtgttattcaccccaagcgttgatacactttattttgaaccagaaaaggattttttttctgtaacttggcggtgccaattacctattcaaaatatactcgatatagagcaaattcttataggaccaagactagatagttatgtttctcgtcaaacgtatcaatctatttgtaagggataaagatgaaaaataaaaattatttatccattgttgctgctgggttatgtactcccgttggtacagatatttattcagcaacagcagccattcgttcaggattagatcatttccgtgaaactcattttcgagatacgctaaatcagcctattgttggctctttgttatatgattatcaggtatggggacctgctcgattaattgcgttattaaataaagtcattgatgattcattggcgaatattgctatcaataaagaaaatattgttatctgtttacttttaccagaagaagaacgtctaggtattttcccacaatggttaagtatagttactgacgctatattgcctcgctttcataaaagctctatcgcgttatgtcgtggaaaagcaggtattggggaagcgttgccttttttacagcgaatattatcagaaaaaaccactcatattgcattattagttggttgtgatagttattttaatgcagaaacgattcgatattatacgaatacaaatagattattgcattcggaaaatagtgacggttttattccaggcgagggagcggcttctgttgcatttacattaacaagcaataataatagtaaagaatacgttactattcttggttttgatactcaattagaagtagctcatattttgcaaactaaattgcctttaagagtgaaaagtttatcaaatgctattgaacaagcttgccaacggtcaaatcttcttttacatgacactcaattttgtatgagcaatgcaaatggtgaagctttttactttaaagaagttgcgttagctattacgcggacattaaaagaaaaagtagaacattacccccattatttaattgctaaaagtgtcggtgaaacaggtgctgcgagtagtgtgattatgttagcgatattatcggagtggatgaagcaccctgaaggacccgggaatactggattgataatatcaagcgcggatagcggagaacgaacagcgatcattttacaatatcaagaggtaaagtagatggatacgcgagtttatgttaacggacgagaaatttgctctaaagcatccgatggtgtatcaacggccgcgtttccagatccttgctggtctcctggcccctcagtggttccttatcctaacacctctagcgcagatgctttatcaaatggtacagcgactgtttttatccgaaatagtatggttgcacaagaagatcgttcattcttttctattagtacaggagatgagccagcaactaatgggttagccaaaggcgtgataacaggcgttattaaaggtaaagcctattttcggtcatggtcacttaatgtgaagtttgaaggatatggtgttgcacgtcatcaagatcttatgtcacataatcatggctcttttccatctaacacaccgacatttccgtatatttctcgaggggttttgggcggtattaaagattgtagcaaagaaaatacacagattgaaaagcgctgtaaacccgataaggataactcggatgtccaacaagagttaaaaaaagaaagtgcgcttagaaaagcattagcaagaagaaaaaaaatacaaaataaaaaaaatagcaataaatggcactggacggaggatcattgtgctgggttagaaataaaaatgtcagggaaagatcctaaaaaagttgctaaagagtttatggatgatatttctgattcgatagacgcattaaaaagcgaattagattatgttagtgcattaaaaagtaaacttactgatatggcaaaggatgccgcatcaaaagcattcggtaaggtaatcacaaaggctggaataaaacaagtagcaggtagctcagttccaggttggggaaatgcggcaatggccgcatggacacttggtgatgcagtctatgcaggttttgaggttagcactattaaatcagctgctgaagagggactagaacaagttaaagtcttatctgaaaaagcggatgatataaaaaaattgatcgaacaaactgaaaattataaaaacttatcacctgaagagcagctagaaaaagcacaaaaattggctgaagatgcacaagatattcttgctagcttaaatgcttgtgttcgagcaagaaaatgcaatttagtcccttattctgtaaaaaatgcgataaaaaaaggtgccagaggaagtaaagtagagaccgcgaaaaaaggaggatgttgccaaggacaaacggggcatcatttaatttactctcatttgttaagagagacatgtaagaattatgaggagtccatagcccctactgtttgtgtggaaggtacgtcttggcatagtggtagtcatgggcgtattcatatggcgatggatgatgaaattacttatttagttgaaaataatcgattaaataataacactatgagtatgcaacaagctattgatgctgccgttaatgcccataaaaaaacgtttccatatgctgattgttccaatagatgtattagagctcaattagaaagttattatttatcaatatgcaaagatgcaagattacccgcgaaagactcgaggggtaataacataaaatataacgaactagataggtgatttatgacatatataaaagaaaaaacttggaaagaggttctgaaaggttggataattactggttgtgcaatccgaaataaaaatattgtgtacttttgtttgcgcaaagatattccatacgaaaaggctcgaaacttatggaacagtgaaatacctagtatgttattagctatctatttagatacaccagtcacacctacagggtatgcgagtattactggatttgataatcctaaagtaggtgtttgcttaaaaccgaaagaacaagggatgcttgcatctagaggtgatgatggtgttgtggtgtgtgtaggcagtggtgctaatttgccaccagaaaaagttatggatggtgactatgcaaaccctaaaaatattaaatgtgttggtggatatgcttattatgttggctctgcacgcaaaatttataaacgtgtggatattgggaaatggcagagaattcaacatgggataccaggaggagaaaccaatacagatatggggttcactgatctcgatggtttttctgagcaggatatgtatgccgttggcggtgaaggcgatgtttggcattataatggcgaaatctggatcccctgtggttttccctctaatgagcaattaagtgcagttttatgtgcccctgatggttatgtgtatattggcggtgaagggggcagtttatggtgtgggcgtgaatatcaatgggaaaaactttatcacggcagttcgactattttactgaatcagttacgctggtttgaagataaagtgtgggcatgtgatgactaccgtttacagtgttggaatggtaaagaaatggtccgtcccaaggatggtgataaaaatgttatcgcctcaggtcatatggatgtccgcgatgggattttagttgtagctgatgattataatgttgatctgtatgatggaaccgcttggcataagatagtgagaccttataaataataggattattgagtggataaattatgtcaacaattatgtttccaaccccacccccgataattagacagcatctgaacaatgcaatcttttattataagactttgtatgaaagtcgttattcgtcattaattaatgtggataaatttaattattttaatgcattattaaatgctaatgttgatggcttatgttgtgcaaaagaaaaaggtttagatgaagctcgaatcgcactattacgttggaaaggacatgaggaagcttttatctatactttactttttaatgagttagatagtgaaaaagagtttgatcgtttttggttgatgataaaagaactaggatttaatgctgttattggttcgttggaggcactgctccgtgttgagataaacgctagaactgcacaattagcactactgaaagaacgagagcctgacatattcattgtcgctttattaaaaataaaagcacatcatcaggagctaatccatcatgataaattattatattatttaaatcttccctcaaaagaaattaaaatcgcattatgttattatgtaaaaaaaatgaagctaataagcttttccgaaaatattagaatgttagtaaatagctcgacagatattgctgtaaaatatgctgccatagatgcgatgtgttggctttcaaatgataatgaatataattatatagcgttatctcaacttttaccattatatttggaagagaatacacctaaaggaaatcaaagcttaattcattctcaaaaaatagaaaacttagtccgtttaatgggatgtatatcgtccactaataataaattaatagcacctccgagtttgtatcctgaatatttgaatattatttattatactcattcatgtcatgcagaatatcttcctgatcttatcaattatttagataaccccgaattatcgaggctggcttataagggaatttgtattcttacaggtattgatgtcaattcgcctgaattaacatactcttctcctgaaaaagttgaattagctgtggatagtcgagttcgtttcctttcttcaggtgttaataatattaatattaaaaaggttaaagaaaccataaagttattgaacttaaaaggaaaaattattcttggtaaaccagtatctattcaacattgtgaaaagattattaaaaagggttatcagcttgaaaggcatatagcaaattggcatttatgtcatatgaataaagaaaataaatataatgatttttgtttttttaatcgaattaaaaataaggagttgatatgattaattatccagatttaaataaagataatattcgctatcaatcagcttttggaaaaaaattagtaataagcttttgtgcatcttggtgtaataattgtgaatcatggaaagatacttttacgctactctctgaaaagtttattgatgactgttttatttggattgatattgatgaatatccagagttagtcagtgagattgaccttgatataatccctgttcttcttatacaaaaaaaagaggatatccattttttgggccccattaggccaggattggaaacaattgtgagtattctaaattcagataaagtaatgaaagttgaatttgatcccggaattagagattatttaattgcccccgacctccctaaaaggacgatatattaatttactaaaatgaataataggggaaagtaaccaagtgattgacaattgacgacacgggtaaagggcttgagaatgaaaatatttatccaaagcaccgtaaaaccccgtccttcaggtcggggataggggatataaggcgcggttttttaactaacgaggtgtttcctgttgctcaatgtactggcggataatggatattgctgcgccaccacaactccccgcgaaataacttggcgaccaaagaacccccttgtagtaatcacgttgggcaatatcaggacgatcacgtcgaagtaatcgactcgatacccctttaaggctgttaaccagattagatatcgccagttttggcgggtaattaatcagtaaatgaacgtgatcccgttccccatccatttcaaccagttcaacatcaaaatcagcacaaacactggcaaagtagcctcgcaatttttcaatggcatcctgatcaaatatttttcgcctgtattttgtgacaaagaccaaatggacgtgcatcaggaatacacaatgtctgacacggcgaatattagtttcatttttcatagaccaaagtataatagataatatgaaacgtctacaagcctttaaattccagttaagacccaatggtcagcaagagcgtgagatgagacgctttgcaggggcttgtcgttttgttttcaatcgggcattagcacgtcagaatgagaattacgaagcagggaataaatacattccctatacaaaaatggcttcatggctcattgagtggaaatctgacacagagacacaatggttgaaggaagccccatcacaaccgttacaacagtcacttaaagatttggaacgggcttacaagaattttttccagaagcgtaccgcgtttcctcgattcaagaaacgcggtaaaaatgaggcttttcgctacccgcagggcgtgaagctcgatcaatccaatagtcgtatatcattgccaaagttgggatggatgcgctaccgcaacagtcgtgaagtcgtcggagaagtaagaaacgtcacggtcagtcagtcatgcggtaaatggtacgtcagcattcagactgagtatgaagcgacagaaccacaacatgaatcaacctcaatagtcgggcttgatgcaggcgttacaaaactggccacgctttcagacggtacggtatacccgcccgtcagcagttttaaagtaaaccagcgaaagctggcaaggcttcaacggaaattaagccgtaaaatccaattcagtgccaactggcaaaaacaaaagcgcaaaattcaacgtctgcattctcatattgccaatatcaggaaagactaccttcacaaagtcaccaacgaaatcagcaaaaaccacgcaatgattgtcattgaggacttaaaggtcagtaacatgtctaaatcggcaaaaggtacgacagaacggcatggacggaacgtaaaagctaaatctggtttaaaccgctcaatactggagcagggctggtatgaaatgcgccgtcagcttgagtacaagcagctctggcgaggtggtcaggtactggcaatacctacaccagtcagaagtgcgcttgctgtggtcatacagcaaaggaaaaccggcagtcacaaagtcaattcgagtgccttgaatgtggatatacagcgaatgctgatatcaacggggcacgtaacattttagcggcaggacatgccgtgattgcctgtggagggagggtgcagtcagaccgcccgtcgaagcaggaacccgccgaggtgattcagacatcagtctgaacgcagtagggatccacgtcctttagggcgtggaggatgtcaatatcatgacatgtcagggaggcgtttagcgttaggaaaaatcgcccttggacagaaagtgttctatcaagatgaaggctttaccgtctatcgcacgacaaacaatcttttccttgttgaatcggcggaaggtgattatcaacttttcgaagccaatccacataaaatcaatacactgcgcttaatgaaaagtgctgatcgtcataataacgctttacactaccgctatgctaatgacggtgaattggtacaaattcatgatgatgcgtatctgaccgatatccggttacattatgatgaaatcacccaacgcttacagtcggtgacccgccaccaaggacaagaagaaaaaacgctggtcacttatacttatgatgcacaacagcgtttagtgcaagtcactaatgcggataagcgagtgactcgtcgttttggctgggatgatgaatcgggtttaatggccatgcaccaatatgccgcaggggtcagtagtcattatcggtggcaacgttttgatgcctttaccattgaagacaatgaacctgagtggcgagtggttgagcactggcttaaagacggtaaacgctgtttagagcataccgaactgacgtatgatttagctcaacgaaccctcaccaccgtggaaacggggggcgaaaccaccttccgtcgctggaatgaacaacagcaaattatcgaatacaccaatgcattgaatgaaacgtggtggtttgaatgggataccagccgcttattaacgaaagcaatagccccagatggcagtgaatgggggtatacctatgatgagcgcggtaatttaacccaatcgaccgatcccgaacaacaatcgacttgctatgattgggacaaagattttgcgtttcccacggcacaaactttgccaaatggggcggcttggcattgggagtacaatgagcacggcgatattcgtcgtgtgattgacccgcttggccatatcacgcgcttggcgtgggatgaccaaggcctgtgtctggggcaagtggatgctaagggtaatgaaacccactatcgctataatgcccgcggtcagttaatcgagcaacgggactgttcgggttaccccaccaccttgacctacgatgattggggacaactgcgctcgttgaccaatgcacagaatgaaaccacgacttacacctttagtgaagcggggttgttgttaacagagcgcttaccggatgggacagaaaaccgttatgactatgatgccaccgggcaattagtgggaataacggatgccggagagcgccatattctgttgcgccgtaaccgtcgtgggcaagtgatagcccgacgcgatccggcagggcattggttgcattttcactatgatactttcgggcgtatgcaggcgctggagaatgaacagggcgagcagtaccgctttgagtatgatgccttgcatcgtttaactgatgaacatgatcttatcggacaacaaaagcactatcagtacgatgtgatggggaatgtcacccagataaaaaccaccccggggccttgcgttgatacgccgatacccttatccccgcaggtgaccactttcggttacgataaagtgggacggttgctgtttcgagaaaacgccgattatcgcacggaatacctttatcaacctttgagtgtgacgttacgccgagtccccatggcggtatggcatgaagccgaacgcaccggcaccactgcccgcgtagagtatcaagacgccctgacctttacctacgataaagtggggcagttggttcgagaagccagcgcccgcggtgattatcagcatcactatgatgtgctgggtaatatcactcgcaccgagttgccccatcaacgggcatttgaatacctgtattacggctctgggcatttacaacaaacgcaatggcgagataatgagcaactgacggtattggcggaataccaacgagaccgtttacaccgagaaacgttgcgcaccagtggcgccttagacaatgaaacgggctatgactgtcggggacgtattacgcaccaagtggcgcgccaaatgaatacctcacagtttgtgaccccggtgatagaccgtcgttaccgttgggataaacgcaaccaacttatcgagcgcagtgtcagttatggtcaaacgggcgaggtttttaccgccggacattggtactaccacagttatcagtacgacccactggggcagttgacggcgcatttagggtcggtgcaaaccgaacactttctgtatgatgcggcggccaatttactgacccgtccgcacaccgaagcaccgcataaccaagtacaaggtagtgataaatttgattatcgctacgacggttttggtcgcatggtctcccgctatgaaaaaggcagtagctcggggcaacgctatcactatgacagtgaccaccgtattatcgcagtggatatcgaccaaaggctcttagggtatcagcgaggggaataccgctacgatatcttagggcgccggattgaaaacggttatggaaagccagtgcgattgccaatacaatgacctatcaccaacatgagccggataaagtgtacaaaaggctctagatgagatcctataacaactgaaaaagggaaagaaagataatggagtatataactaataaacattgggccaaatatatcaagggatatatttttactggttgtgcaatccgagataaaaatattgtgtacttttgtttgcgcaaagatattccatacgaaaaggctcgaaatttatggaacagcgaaatcccctcacagttattatgtatttatttagacacaccagatgacccgattgattatattagaattgaagggttcgataatcctaaagtaggtatttgtttaaaaccgaaagaacaagggatgcttgcatctagaggcgatggtgggtttgtcaagtgtatgggcagtggatctaaatttccgctagaaaaagttatggatggtgactatgcaaatcctaaaaatattaaatgtgttggtggatatgcttattatgttggtacttcgcgcgaaatttataaacgagtggatattggaaaatggcagagaattcaacatgggataccaggaggagaaaccaatacagatatgggattcactgatctcgatggtttctctgagcaggatatgtatgccgttggcggtgcaggtgatgtttggcattataatggcgaaatctggatcccttgtggttttccctctaatgagcaattaagtgcagtattgtgtgcccctgatggttatgtgtatatcggcggtgaagggggcagtttatggcgagggcgtgaataccaatgggaaaaactttatcacggcagttcggctattttactgaatcagttacgctggtttgaagataaagtgtgggcatgtgatgactatcgcttacagtgttggaatggtaaagaaatggtccgtcccaaggatggtgatagaaatgttatcgcctcaggtcatatggatgtccgcgatgggattttagttgtagctgatgattataatgttgatctgtatgatggaaccgcttggcataagatagtgagaccttataaataataggattattgtgaacatcaaggccttattggaacttacccctccagagttctaaagccttttcaccggaggaaaaacctccagcatatggcctattttgagtggttcaggtgctgtcagtttcaatgtcattcctcttaaggggatttagacatcactgtttttcgtaatgtctcgttgcttacaagtgttgcatcaagcgggttgataaattcctgataaacttcgggattaacatttatgactcgcagatctttcagtgtttcttcagctgaacgtcgaacggctttcaaaacaaattcagtatggttttttcccacagcacgaataaaacaataaaaaacccaacaacgtatctaattaaacgctgttgggttataaaacgtgttatttaactgtatgctttaaaacgatgaaaaagccattaaagtacagcgacaatggcttcacacaatggaaccatattttccagtgttaagcctgcgacattaatacgaccagagccgacaatataaataccatattcagcacgtagacgttcaacttgctctttattaaggccactaaatgagaacataccattttggtcaataataaagctgaaatcttgttttgcgcctttttcttgtaaggttgtcaccagcaattgacgcatacgctgaatgcgctcacgcattgtggtgagctcttcaatccactcttcttttaactctgggttagataaaatagtggtcaccacagatgcaccatgtgccggtggattagagtagtttgcgcgaataatcgctttggcttggctaaatgctttctcagcagtatcgctctcttttgcgacaatagtgcaagcacctacacgctcattataaaggccaaagttttttgaatatgagcttgcaacaatcagctcaggattgctttcagcaaataggcgtaagccttgcgcgtcttcttcaaggccattagcaaaaccttggtaagcaaagtcaaatactggtaaccaacctttctctgcggataaggcagccaattgacgccattgctctaacgttgggtcaataccacttgggttatggcaacatccgtggaacagcacaacatcacctgcttgtgcattttgtaggctagctagcataccttcaaaatctaaaccgtggctttcggcatcataataatcatattggcaaatctctaagcctgcagtctgaaaaatattattatggtttggccaagtcgggttacttatccatacacgtttagcattagtttgctgagcaataaagtccgcagcaatacgtaatgccccagtaccacccggagcttgtgctgtacgtgcacgtttttctgtgatgatagggtgttgttcaccaaacaacagtgcttgagtgaccgcaccaaactcaggaataccgctaataggaagataatttttagtggattcgttttctaataaatatttttctgcttttttaacggtggtgagtacaggtgttttacctgtttcatccttataaacaccaatccctaagttaattttgttttcacgagtatcagaacggaaactatcagctaaacccagaataggatcggctggtgcagcaatgattttctcaaacatagtgtaattattccctaagctcaaaacgaagccgaattatgagtaacaagagtaacgctatagaatcggtttgccaacagtttgtagagaaattagcaagaagttgtgaactaagtgagaataaatagcaaaacaagatgtaaataagtaaatctttcgtgattacattaacatgtaaatataaccactaaaaataaccaatagtttagtataataaactgtttatcttggtattagaaaaggaggaacagaaaagcgagcaatataaataggataggcaaataaaaaagcaacaccgaagtgttgcttttcaaatcaattaacttgactgtttaattaccttaaagggtaattagaactgataagtcagacctaaaccaactacgttgtcagttgcaacgccgttagctttagtgaagtcatcttcatctaacaggttgattttgtaatcaacaactgcagtcatgtttttgttaaatttgtagaaagaacctacagagatatatttaactaaatcatggttgttgtctttcagaccgccaacaccattattcagatctttacctttagattgaacataacctaaagatggtttgatacctaaatcagcaaagtcatactgtgcagttaactcgatattttgagttttgtttgcaattgcaccgtcaccatagtagttcatgttacgggtttcaccgtacattgctgctaagtaaacattgttagcttcgaatttaccaccaacgttccatgcttcagcacgtttaccagtagcatcactcttatgttcttgccagttagtacgagcagaacttgagtaaccaccacccagtgttacgccccagcctaagttataagctgtagagaaaccaaaaccgtcgccatttgcttcagcgttgtctttacgtttattgttggtgttttcgttatttttgccttgatattgcagagcaaagcttaaaccatcaacataaccgaacatatcggtgttacggtaagttaatacgccagtagtacggctagtcatataaacgtcagtttgcgccatggagtcaccaccccataaaggcagaacgtcagtccatgcgttggtgtcataaattacaccgtagttacgaccgtaatctaaagaaccgaagtcagcaaatttcagaccagcatatgctagacgagttttagctttgttctcgccttcagtagtgtttgttttaacttcgtattcaaaacgaccgaaaccagttaaatctttattgatttgagtttcgcctttgaaaccgatacgtgcacgagaagcgtcaccgctttcatgatcgcctttagtatcagcatcagcgaagtaatgacgaacgtcaactttaccgtagatatctactttgttgccgtctttgttgtacatttcagctgcgtttgctgcaccagcaaacattaaagctgggattaccactgcaagaatattgcgcttcatcattattattaccctcattggtgttattcagacacctttgccactgccagaaatagtttcttaatttttatggaactatttatgagagttaagtgtcgtctgtgtcgggtgacagtgttccattggtaaaaaattttatctaccccgaatttgctacaaaatcgaaaaaagtgtaacaaattgtaacaatgtatttcaaagtgtgtatttgggggaacttttccatcaaattgtagccatgcataaaaaaagccaaccctgaggttggcttctggtataactaaagttagtacaattaatcagcaacacaaatgttttttgttggctactaattaatcaaactattagaaatcgacatttcttggtgtacgtgggaatgggatcacttcacgaatatttgtgacaccagtcacataagcaactaagcgttcaaagccgagaccaaaaccagagtgtggtactgtgccataacggcgtaaatcacgataccaccagtagtcttctttattcatacccatctcagctaaacgtttatcaaacatctctaaacgttcttcacgttgagaaccaccaatgatttcaccgatacctggtgctaacacatccattgccgcaactgttttaccgtcttcattcatacgcatatagaatgctttgatatctttcgggtagttcttcacaaccacaggggctttaaagtgtttctcagcaagatagcgctcatgctcggaggagaggtcaacaccccaataaactgggttttcaaatttctggccgcaattttctaacacagtaatcgcatctgtgtagtcaatttgtgcgaaatcagaagcgataaagtgctctaaacgtgtaatggcttctttatcaacgcgttgagcaaaaaactccatatcatctctgcgctcagctaacacggcagaaaaggcatatttcagcattttttctgctaatccggcgatatcattcagatcagcaaaagccacttcaggttcaaccatccagaattcagccaagtgacgactagtatttgaattctcagcgcggaaagttgggccgaaagtatagactttacttaatgcagaggcataagtttcgccgtttaattgtcctgatacggttaagaaagcttcgcgaccaaaaaagtcttcgctaaaatcaacttcacctttatcagtacgtggcaggttgttcatatctaaggtagagacacggaacatttcacccgcaccttcggtatccgccgccgtaattaatggcgtagaaacccagaaaaagccttgctcatcgaagaaacgatgtagtgcttgtgccaaggtatggcgaacacgtgcaacagcaccaattaagtttgtgcgtggacgaagatgagcaacttcacgcagatactcaacgctgtgacgtttagcggccatcggataagtttccggatcatcaaccattcctactaccacaactttggtcgcatgaatttcaaagttctgaccttgacccggagattcaacaattttaccggtgacttccacagagcaacctgtggttaagtgcagcacttcatcttgataattcggtaaattattattaatgatggcctgtactggattaaagcaggaaccgtcatagacggtaaggaatgagataccagcttttgaatctcttcttgtacgtacccaaccgcgaacggtgacgtcttcgccaaccgcgatacggccttgcagtacgtcgactacaggcgcaacgatcataaataaatctctcttcgtttaattaaaataattgtttagtaaattcattctgcccctgtcggacagtttttctatgttacttgcaatagcgcaggaaacaagtaggaaatttcagtttaaagagggaatcagcaagagaaaagcctttatagaaaatattttgctaaaaataggtaaaatcagtcgaatagtgggggtgatagcaaaaagaaagggcaatattggccctttctttatagatagaatagatagagtgaataaatagcgatttaatctttattaacaagcttgcctaacaagaggaacatcaaaggctttacgtagcttgtcgacaaactcatcatcttcacaaatggttttacctggactatctgataatttagcaacaggtttaccattacactccaccagcttaatcacaatattaagaggtgtaatattcgggatattacaagtcaatctggtgccgataccaaaaattaagcggatacgcttatggaaatgcttataaagtactaaggctttctgaaagtcgaggctatcagagaataccaatactttactcatcggatcgataccgagcttttcataatgagcaatggctttttcaccccattcaatcggatcacctgagtcatgacgtaacccttgataacggctggcgaatggcatatcaaagtcacgcaggaatgcatccatagtgatacaatcagtgagtgcaataccgagttgatctgggtattcatctagccatgattgcaatgcagcccgttgactattggcaagctcaggactaatttgctgatgtgcttggaaccattcatgggcttgtgtgcctacgggggccagttgcatacgttcagcaaaatgatagttactagtgccgataagataagggaaatgattttttaattcatcgacaatggcacgttgcacatcataagaaaagcgacgacgagtaccaaaatccatcaatttgaaatccgctaaatcaatctgttgttcagccgcatcacgatagaaaatatcgataagtttgcgtaattgaataacggcgtcatcagcggtgatttgtggcgaacgagcacggtggacaatttcactcaccaatgctaacaaaggaacttcccataaaataacttcacgccaagggccagttatcttaatcgtcaattgattgtcagcagtggtcgcgatatgcacttgctcgggtttaaagcgaaaatgtttaaaccattgcagatagtcatttttaaagaaaggcaggctttgaagatagccaaactcttcattagttaatgacaagtctgccatcatatccacttgatggcgtaaggttgttgcatattcacctagacgttcatcactccggcagcggaattcagcaacgacaggaatatcactataatgatggtaaaccgcctgttgcatgtggagcttgtatgcatcggtatccaacagtgatgtaataatcggtgtagcgtctaaaatcatagcgcgtcaagcatcctcacggagcgtttttatgtcagctaaatcgttaaggttggagagtatacccgaatatgatgataatgcgtcactattcgttaatatttctctgcgacataaaaacaagctgtaaatctctattgagtttaccacgttaaacataatttgggagtatgttagcatcaattagcaaataaattagttacacatattaataccccattaacattctattgacttttaatgtgctcaattgaatattcgactagctaaaccgttttttgacgagtaagctttggttatataaccgtaaaatagtcgtgttaactaaaaggcttttttctatgacacaacaaagaattgctaaatatcgtaaagattaccgcgccccagattacaccatcactgatttgcatcttgattttatcttagataaagaaaaaacacaggttactgctattagccaatgcaagcgcttagcgacaacggtaacgccgttggtgttagatggggaagatttaacattaaaatctatttttgttaatgatgttgcttggacacactataaagaagaaaacggcaaactcatcattgaccaattgcctgaacagtttacgttaaaaattattaatgagattaacccatcagctaataccgcgttagaagggttatatgtttctggcgatgcgctatgtacacagtgtgaagcggaaggtttccgtcatattacttattatttagatagaccggatgttttagcgcgctataccaccacgatcactgcagataaaaaacagtatccttatctattatctaatggtaaccgtgttgcacaaggtgatcttgaagatggttgtcattgggtgacttgggaagatccgcatcctaaaccaagttatctctttgcattagtggcgggagactttgatgtattacgcgatacatttaacactaaaagtggtcgtgaagttgctttagagttatttgtcgataaaggtaatcttgatcgtgctgattgggcgatgacatcactaaaaaatgccatgaaatgggatgagtcacgctttaatttagaatacgatctcgatatctatatgatagtcgccgttgatttctttaatatgggagcaatggagaataaagggcttaatgtctttaactctaaatatgttcttgctaaaagcgaaacagcaacagacaaagattatttagggattgaatctgttattggccatgaatatttccataactggacaggtaaccgtattacttgccgtgactggttccaattaagcttaaaagagggactaacggttttccgtgatcaagaatttagctctgatttaggctctcgctcagttaatcgtatcaataacgtgcgtgttatgcgtacagcacagtttgccgaagatgcaagcccaatggctcatccaattcgtccagatagtgtgattgaaatgaataacttctataccttaacggtatatgaaaaaggggcggaagtgatccgtatgatccacacgctactcggtgaagagaaattccaagcgggtatgcagatgtatattcatcgtcacgatggtagtgctgcgacctgtgatgattttgtacaagcgatggaagatgcctctaatgttgacctgactttattccgtcgttggtatagccaatcaggtacaccggtattgactgtacgtgatagctatgacgcacaaaaacagcaatatacattaaccgtcagtcaaatgacgccaccaacggcagatcaggcggaaaaacaagttctacatattccgttagatattgaattatataatcaacaaggggaggttatccctttacgttcacaaggtcagccggtttctaatgtattaaatgtggtgagagaagagcagcagtttatttttgatgatgttgctcaacagccaattccttcattattgcgagaattctctgcgccagtaaaacttgattatccttttacggatgagcaactctcattcttaatgaaacatgcacgtaatgctttttctcgttgggatgcggcgcaatctttattaggtcgttatattaaagaaaacgtttcgcgtgttcaaaaagggcaaccattaattttacctgaaatggtaattgatgctttccgtgctgtattgcttgataaagatatcgatcctgccttggcggcacttattctgacattacctaccgatgttgaagcgggcgaagcttttgctattatcgatcctattgctattcatcaggccttaggttttattcgtaaaactttagccactgaaatggctgatgagttctctgcggtttatcactcaatgcatatcggtgcttaccgtgtcgatcatggtgatattgctaaacgtgatttacgcaatgtctgcttgggttatttagccgttgaaaaccagcaaacgggtaatcaattggttgaagcgcaatatcacaatagcgacaacatgaccgatgcactcgcggccttaaatgccgcagtaatggcacaattaccttgtaaagaggcactattacaagagtttgatgataaatggcatcaagatggcttggtaatggataagtggtttagcttacaagcaatgagtccggcaactgatgtattacaaacagtacgcagtttgctatcacatcgctcttttactttagctaacccaaatcgtactcgtgctttaatcggtgcgtttgtgaataataaccctgtggctttccatgcagaagatggctcaggttatttattattgacagaaattctgactgacttaaatagccgaaatccacaggttgcatctcgtcttattgagccgtttattcgtttgaaacgctatgatgctaatcgccaagagaaaatgcgtgccgagttattaaagctaaaagcccttgataacttatcaggtgatttatatgagaaaatcactaaagcattagcggattaacactatatcgctatcactaagtaagtgataagaaggtattaagttagcatgataattagatccccagcatattctggggattttttatggtaagtatttcatacaaaaaattataatggtttaataatatgtattgaataaaagctaaggggttatgactattattcaaataatttttggcgttctttttctaattgtaaaattaattctttttcgcttggtaattcaagcatatattttgaagcgaatagctgtttactttcatttagaatggagtatttggctactgtgtgatttttttcagtgcaaagaattagccctatggttggattatcatcatgacggcgttttttctcttcatacatgcggacatacatatccatttgcccaacatcttgatgggtgagtttatgcatttttaagtctattaacaaaaagcattttaagtgaaagttataaaaaactaaatcaatatagaaatcaccatcattagtactaatacgttgttgtcgttcgacaaaagcgaacccttttcctaattcgagtaagaattcttttaggttttctattaaagtttgttctagtttattttcttgcaggatactactaggtagtcctagaaaatcaaaaatatagggatcacgtaaataatctttgactgaagttgcgagttcagtagttttttgttttccttcagctaatacaggataaatactttgctgtttcccctgtgttgaaagtaatcgttcataatataatgtgctaatttgtctttctaatgcacgggcggaccaagattgtgtaattgcttcatctatataccattgacgggcgagttcattctttagttttagtagcgttctataatgagtccaacttaattcgtgacgcactgcgtcacgaattggaaatgtgagataaaatttcctcatatatcgaagatttgaggtatcaaatcctttaccaaattcttttgttaattcagctgataaagtttgtaaaactctttttccaaattttgctcgattatctccatgttgttcatcttcaacaattaaacgaccgatttcccaatatgtttgtaccattatgctgtttactgcttgtactgtgttttttctaccttgtatcaagaggtttcgaatattcgtaagtaaaggggtgtgcgtgttaatggtttttttatcgttcataaagtagtttccatttttgagtataaaagactcttttactcaatttactatccaagtttagcgctactgaattgctaggatttaactagtgttatattgctcaataattgtagaaaactttatttattgataaatatgaaaaaaatcttaaatattgatttttttaagttttttgagatgttacatcatcttaatgaaaggagaattgtgcgagggacatcataaactggggattttttatggtgaattgtgcaattgaaacgtttacttttcgtgcttttatctatatgatgctcgacgcttaaatcgtcgtagacatatcattcctaatacccgatattctcaatggagatcgtatgtattattccttagtaaggaaggcattgtttcggctagatcctgaacgtgcccatgattttacctttcgtcagttaaaacgcttatctcattccccatttcaatttcttattcaacaatcacttcctgccaaacccgtttcttgtatgggactttcatttaaaaatcctctcggtcttgccgccggccttgataaaaatggtgattgcattgatgcattaggggcaatggggtttggctttattgaagtgggtactgttacaccacgagcacaagtaggtaatgacaaaccgcgtctctttcgcttagtagaagctgaaggcttaattaatcgaatggggtttaataatttaggggttgataacctaatagagaatgtaaaacaatctcaatatggtggtgtgctgggtattaatatcggtaaaaataaagatacccccgtagagcaaggaaaagatgattacttaatctgtatggaaaaagtttacccttatgcaggttatattgcgattaacatctcttcacctaatacccccggcttacggacactccaatatggtgaagcattagacgatttattatctgcgattaaaaataaacaacttgagttacaagggaaatatcaaaaatatgtgcctgtggccgttaaaattgcccctgatcttactcatgaagaattaatccaagttgcagatagcttagtgcgtcaccatattgatggcgtaattgcgaccaatacaacattagacaaatcattagtgagtggattagatcactgcaatgaagccggtggattaagcggtcgtccggttcaatcaaaaagtacacaaatcattcgacaactaaatgaagagttaaaaggcgctttacctattattggggtaggggggattgattcattgactgccgcacgcgaaaaaatggatgcaggtgcttctttaatacaagtctattcaggattcatttatcatggtcctgcacttataaaatctataattaatcatatttaattacattcaataatcagttaagggcttttcttctgcccttaactcgtttatattgcctctagttgattattttttattaaatggcagtgattgtgcttaattaataaaaaaatgaaccctgtttttgttaggtggtattaaatattttatttaggttatttaatattgagtatcagagaaaaaagcaggtaataaatcgaagggggaataattagtgataataaaacccgatgatcgctggcgttggtattttgatgacgagcaacaaaagttgatgctcgatttagctaatggaatgatttttcgtagtcgttttccaagtaaaatgctaagtgcaactgctcatcaatcatcaccttttactgttgatgatgctgctctttattatggatatgatgagcaaatccgccagattgatatgccttctgagtcgcgagcagaattagcgttaaacgcattaatagcccatcgttttttaaagccattaatgcctaagagctggtattttgaagtgagtcattcatcaacccgcccttatttagctcaagtggtggaaaccgcattgaaagatagcaatgaaaaagtgctttttttagtggcggaagtgggagagcaagcctgtttatgcttattagcccagcctcagttagcattatttgatagaacactaacgttttgtgatccactaaaaatcatgaatgatcggttaagtgaatatcataaacagtctgagccaagatcgtttttgtacgaaaaagtcatctaataaaagagtaaaaaggacttactcttttattttcacttattgtttataatatgctaaaaacaattggccttaaacaacacttcctaaaatcaaatctgcattattctctttttgcaacaaatttataaaagtaaataaagtgagtttatagttaatttaaaattgggttattgatgagataattcttaatcagcagagcagatcatgcaaaataaaaagaagataaggacagtttaccttctttttatttgtgataaagataagcgttattttttattaagtgaaagttttacattgcctttaggaacacaactacatgcgagtattctgccagaacgttttatggcacctgcttttaatgcattgacatcaccttcatctaattgaataacacaagagccacaaatccccgcacgacaactatagggaatagcataaccgtgattttccagttgctctaacaacacctcttgattattcccatcaaagctgatgccattaaattcaatagtgacagcttgttttggctcttgagcggaggctgctgtaaccgcattgtcagttgctggttcggttgtttgctctgttgtttgtaaataagatttcgcttctttataagctaatatttcaactttatccccaacacgaataatacctgattggcgaatgataatattttgaccaaaatccacatcgcctttttcatctgtacggaatgtttgcagtgttgctaacggttctgtggtaggatgtttaatgcctttatcgatactgatagtggtcataatgcagcgactgcaaggcttgactaagtccatgacgacagagccaatacggattgtttgccagctatcttctgcaaaaggttttgcacctgtgatgatgatattaccgcgaaattgctcaatattgattgaagctgggcaacgctgttgcagagactgaaatgaggcttcattaatcaatagataagggtaaccgtcagcgaacgaaaccgcggtttcaggagatttttttactcgacgtgttgatttttcacccgtccagcgaagttgtacatccatgcctaaatagcggctgaaccattgatttatttcatctggggcaacataagcggtaaaatgatttccccacacttcagttggttgtaatgaagattgaaaatcctgataagtaatggcaattccttcaccatcgggtgcttgaatataaataccatttgtcattacagtgggaataaaacacagcaacaaagggtatttacgtgcggtgataaatgtcccctcaggggtcgttatcataaaatcacgatcaaacgtgaagccgctttcacgggcaaaggcttgagaaagacgagtccctttcattgattttacagggtgtatataaaggcgtgatacgttgatcatcagtgctcccaaaaaggttttattatttttttatcgtcagtaactttatgacaacgtaatacaattagctataatgcccaacaattttattttaggtggtaacaatattatgcgctctctgtttgccagcacaggccgaggtctggaagaattattaaaaactgaacttgaacaccttggtgcccagtcttgccagattacgcaaggtggtgtctatttccgtgctgatgataaaaccatgtatcagtctttgctctggagccgtttagcttctcgcatcatgcttccgctaaatgaatttaatgtctacagtgatctagatttataccttggtgtgcaagcaattgattggagcgaagtatttacagttaatcatacttttgctattcactttaatggcactaatgatgtgatccgtaatagccaatatggtgcattaaaagcgaaagatgctatcgtcgattcattccaacgtaaaatagggcaacgaccggatgttgctaagcaatcaccggatattcgtttaactatacatctacataaagaaaaagcgtcattatctttagatctcagtggcgatggattacatcaacgtggttatcgtgacttaacagggcaagcaccgctaaaagagaatctagcagcagcgattattatgcgttcaggttggaaaaccgatacaccattaattgatcctatgtgtggctcaggtactttacttattgaagcagcaatgatggcgacggattgtgctcccgctttaaatcgagtccattggggtttccgtcattggttaggacataatgaagcgctatggaaagaagtcactcatgaagcatttgcccgcttccgtgaaggtaaaaagaatactcaagcgcgtttttatggtttcgatgtggataaacgtgtattagatatggcaagagccaacgcacgtcgtgcggatgtggccgatttaattacttttacccaaggtgatgcagcaaaactgactaacccagtatccacgggtgttaaagggacgattattagtaacccgccttatggtgaacgtttagaaagtgaacccgcactcattgctttgcatagccagttaggacgtgcggtaaaagcccatttcccaggatggcgattatcactttttagtgcttctcctgaattgttaagctgtattcagttacgtgctgagcgtgaatttaaagctaaaaatggcccgttagattgtgtacaaaaaaactatttattatcagaaacaccttcgacgattaatacacgactggcggaagattttgctaaccgtttacgtaaaaatgagaaaaaactcgcaaaatgggcaaaacaacagcaaattgagtgttatcgcttatatgatgctgatttaccagaatataatgttgcggtagatcgctatggcgaaaaagtggtgatccaagagtatgcacctccaaaaaccattaatgaacataaagcacgccagcgtttatttgatgtgattagtgccaccatggaggttttggcattacgctctgatcaactaattttaaaaactcgtcaacgccaaaaaggtaaacaacaatatgaaaaaatggcagagaaaggggatttctttttagttgatgagtttggtgccaaattctgggtgaatttaaccgactatctcgatactggactgtttttagatcaccgcattgcacgcaaaatgttaggtgaaatgagcaaaggaaaagactttttaaatctctttgcttataccggtagcgcgtcagtccatgctgggttggggggagctaaaagtaccacaacagtagatatgtcacgaacttatcttgaatgggctgagaaaaactttcaagcaaatggattatcaggtagacaacatcgtttaatgcaggcggattgcttacagtggctaagccaaagtaatgaacagtttgatgtgatttttatcgatcctccgacgttctctaattcaaaacgcatggaaaatacctttgatgtacaacgtgatcatattgaattaatgaaacatctaaagcgtttgttaagaaaaggcggaacaattatgttctcaaataataaacgtggtttcaaaatggatcatgaagcattagcgaatattgggttaacagcaaaagagataacacaaaaaacgttatcgcaagattttgcacgtaaccgccaaatccacaattgctggctattaaatcatgctggtgaggaataatttacaatgccgttaattagtttgactggggcttatttagcgtttagtgatgcccctttattagataatacagacttgtttattgatgaaaatgaacgcgtttgtttagtcggtcgcaatggtgccggaaaatcgaccctattaagagtgttagccaaagagcagcccttagatgatgggcaagtggtgtatgaacaagatctggtgactgcacgtttacaacaagatccccccagagatatcgaaggcactatttttgattttgtcgcgcaaggcgttgcagaagatgcgcaatatattaccgaatatcatcgtgtttcaaaggtaatagaaacggacccttctgaaaaaaatcttaatcgattagctcagttacaagaagtgctcgataaccgtaatctctggttattagatagccgtattgctgaagtactggaaaaattagggttaaatggcgaagctgagctttcctcactttctggaggatggttaagaaaagccgcattagggcgcgcattagtgagcgcaccgaaagtgctctttttggatgagcccaccaaccatctagatatagaaactatcttatggttagagaaattcttaaaggatttccaaggtagcattgtctttatttcccatgaccgatcatttattcgtaatatggcaacccgcattattgatttagatcgcggaaaactatcctcatggccgggaaattacgataaatatctggaaagtaaagaagaggcattgcgtgttgaagagcaacaaaatgctgagtttgaccggaaattagcgcaagaagaagcatggatacgtcaagggatcaaagctcgccggactcgtaatgaaggtcgtgtacgggcattaaaagcattgcgagttgaacgaagtgaacgtcgtgaagtattaggcagtgctcgtatgcaggtcgaagaagcaacgcgctcaggtaaaattgtgtttgaattagaagatgttaattatagcatcggtacgcgtaggctcgttcgtgacttctctgcaaaagtgcaacgaggagataaaattgccttagttggccctaatggttgtggtaaaaccacactactcaaattgatgttaggggatttaaaagcagatagtggtcgtattcattgcggcactaaattagaagttgcttattttgatcaacaccgtgccacacttgatcctgataaaacagtgatggataaccttgcagaaggtaagcaagaggtgatggtaaatggtcgtcctcgtcatgttttaggttatttgcaagatttcttatttccaccaaaacgtgccatgacacctgttagagcactttcggggggcgaaagaaatcgtctattgcttgctcgtttgttcttaaaaccaagcaatttacttattcttgatgaaccaactaatgatcttgatgttgaaacattagaactattagaagagctggtggatgcttatcaaggcactgtgttgttggttagccatgatcgtgaatttgttgataatagtgttacggagtgttggatctttgaaggtgatggcgtaatcaatagctatgttggtggctattatgatgcgcagcagcagcgggcacagtctgtttctcttaaaaatgaagcgaataagtcacgtaatgcaccagaaaaaactgaaaaagagactaaaccaaaacagaacgccaaaaaggctacacgaagtaacaataagttaagctatcatttgatccgcgagcttgaacaactgcccgctaaactggaacgtttagaagaggaattaggttgtttacaagaagaagtggctgcagctgatttctttacacgtcctcatgaagagacagaaaaagtgctaaaagcattagctgataaggaaaatgaacttgaaacagcttttgatagatggcaagagttggagatgatgcaaaacggtgaataacgtatgccaactcataacggggcataatgccccgttttagtctctatacttattgttgtttattgattatcaaataaatgagaggtgccgttgtgtgttcgggtcaacattcttgtcatgaagaacaacatgagcaaatattgtgccctcagtgcgatctggtagtgagtgttcctgaattagcccaaggaaccaaggcgacctgtccacgttgtcacactttgctaacagcacgttggcgacaacctttttatcagcctgtagccttggcgattagtgcattatttatgttgttaatggcttgccaatttacttttgtcagtatggaagtggcaggaattaccaataacattactttaatgcagatcccaactgtgatgtttagcgaaaattatgttgagctaggcgctttctttttactctttgtacaagtggttcctgctttctgcatgatagcgattttactgctttgtacacccattaagctgccaagaaaattacaaatttggctatcacgaattcttttccaattaaaatcgtggtgtatggcagagatttttttagccggtattttagtcagttttgtcaagctaatggcgtatggtgatatcggcttagggttaagctttctaccttatgtactttactgcttattacaaattcgtgcatttcaatgtttagatcgtcatacattatgggaaaaactagaatcgcgacccgcttatcctaaaattgaatcaggtaaaacaggtttaaagcaaggggtaagattatgtcgttcttgcactgctattttaccggctgatcaatatgaatgtagtcgttgtgaagtaaaagggtatgcgagaaaacctcatagtttgcaatggacgctctctttcttaattacttctttaattctttatattccggctaacctattgccgattatggtgacggaatcgctgggtaataatctttactcaaccataatggctggggttatcttactttgggaagatggttcatatcctgtggcaatggttatttttattgccagtattatggtacccagtttaaaaatggtagctatcggttggctatgttgggatgcacataaagccaaaggaaaacgtgatccggcgagaatgcactttctctatgaagtggttgaatatgtagggcgttggtcaatgattgacgtttttgttatcgctgttttagcttcattagtcagaatgggacgtctgatgagtatctatcccgattttggtgtagtgctatttgcattggttgtcgtattaacgatgttctctgcaatgatgtttgatcctcggttaacatgggataaatgtactgccgatgatgataaacccatgattaaggagcctaagggtgactgaaaagaacgatactgctttaacacaagcaaaaattaataaactgaaaagctggtctccagtttggataatacctcttgttacgttattgataggagcttggatactttattatcatttcagtcatcaaggtcctgaagtcacattaataacctataatgctgatggtattgaagcaggtaaaactaaaataaagagccgcagtgttgatattggcttagtcgaaagtgtgacattagatagtaattttagtcgagtgatcatcaaagcacgtctcgataatgaaatgaaagagctactgcgtgctgataccgctttttgggtggttaaaccacaagtgggaaaagaaggtgtcactggtttaggtactctactctcaggtgcttatattgagctacaacccggtttaacaggtaaagagcaggatgaatttaatttattggactctccgccactggcctctccggatgcaaaggggatacgcattaatttagtcagtgaaagagcaggccagcttaatgcaggtgatccggtattatttaggggttatcaagtcggctcggttgagacgagtgaatttaatattgaaagccgagatatgcactaccagctttttatcaaagcaccttatgacaaaatggtcacgtcgaatgttcgtttctggaaagattcaggcattgcatttgatatgtcatcatcaggggttcgtgttgaaatggcttcgctttccacactgtttagcggtggggtgagtttcgatgtgcctacggggtggttacctggtgaagctattgcccctaaaacagaatttaaactttatgataacgaaaagagtattcaaaattcgttatataccgattaccgtagctatattatgtttttctctgattctataagaggattacaagccggagcgccagttgagttccgtggtattagaatgggtacggttgttcaagtaccctattacacccaagaaatgcaacaatcgttagataaagatttccgtattcctgtgcttatccatgttgagccggaacgttttgcgaatgatgtcggtgaaagttttgatttcgtaaaagagctttcttctgctgctaaaaatggattaagagcatcgttaaaatcaggcaatctattaacaggtgcgctgtatattgatctggacttttatcaagatgttgaaccttggaaagggccacaaactgttgcaggattaccacaaatacccacagtcagttctggtttaacgcaaattcagcaaaaagtgatgacttcattggataagatcaacaatcttcctgttgagccaatgttgaaagagatgactgcgacattaaccgaaagtcaaaaagcggttgctgaagcgaaggaaactctgaaatcattaaatgctatgattggtagtgatgacttccaaaaactgcctaatgatattcaacagtcattaaaagagatcaatcgcagtatgcaaggtttccaacctggctcaccggcatacagtaaaatggttgataatatgcaacgcttagatcaagtgctcagagagatgcaaccgctattgaagaccttaaacaataagagcaacgcattaatttttgaagcacaacaaggtaaagatcctgaaccaaagagggctgaaaaataatgaaatatattattgggatcgcggtattgatgctgacggcttgttcaagtgtgcctgataaagcttattatcaattacctgatgtttatcaaggtgcaaataataaggttgttacaactactgagagcgcaaagcaagatcagatttgggttcagcctatccgtttatctgatatgttagttaacacgggcattgtctatcaaaccagtgatatcaattataccgttgctaaccaacatttgtggataaacccgcttgatcaacagctacagcaaaatctggttgtgggattagcaaaagaattccctaatcgagtggtttcgacacaacctattgaagataaacttgctaaattgactgtcaatgttaattattttcaaggtcgatatgacggcaaagtgattattgctggtgattggatctacactcaaggcaataaagtgattagtcagcctttttctgtcgcgttaacacaaacggaagatggctatccggctctggtacgtacgctaggggaaggatggcagaatgtcgtcgctgagatcgcaaaaacaattaaatcacaatattaattgttttatacagtaatataagaataaccaatgcctgactaaaatcaggtgttggttttttattcgagataacgagagaaaaatctcatgctggaattgataaaaaagaaataccctacagcgatttgttggtctttcggggataatccgcagcttgctgatgaacttgcacaacttgtcgttgaaagaaaaaaacagcaacatgtagctcattaagtggtttttttagtgatccagtcacgccaacaattggtggttacaatattattttaaatagccatggggttcctatttgtgttatcagaacacgctctttaacattggtacgtttttctgaggtcacagaacagttagcgcgtaaagaaggtgagggtgatctaagcttgtcatattggcaacaaggacataaagaattctttatgcgagaaggtacctactctccagatatggaattaatatttgaagaatttgagttaatagaggttttttagttaacaggcttcatatttgtcgataacttaagttatatcattaatgttgctatggttatttggcataaattttatttttactactgtgaatagtagaaaataggcaattctaataggattgttatattgacataaattgaaaaaaatcgattatttatttacaagctattgtttttattatttaggtcagaaatcggatctttaatattatttttttataaaaataaataaaaatcagcttgttatgatttgctttatgtcttttattaataaatacaaatagatataaattatttaattatattaaatataattaattgtaatctaaggtgatttaaataggatccagcttagtatcacaaatatgacaattatattaatttctttacttgcttaaatcctcaataaagcgtatcaatttatagtggttgtatgaaaaacaatcattatctttccgcttaaacttagaacgtgagggttgtctaaatatgaaaagacagaaacgagatcgtttagctagagcattatcgaaaggttaccaagccggtatgcaaggtcgttcaaaagagcagtgtccctattttgccattgatgcacgttcacattggctaggaggttggcgacaggccatggaagatcgtcctgggcttgcaaaataaataacccgtcgaggtgatactgcggacacctgtgttatcgcaaatattatcaccaagatttaattgataatcaaaagagggttatttatgcatattcctatgaataacttgaacataggacaatttgaatataaataacaactgtgaattggaaataaaaaggtctaccgcggtaggcctttttatgttgtaaagtacggtagggcgaaaacttgccaagtactcttatctgagataccaccataccaccataaaagaaaaagcctaatctcatcgaagagaataggctcttatctatctatgtgtaatattgacttaaaatgctgaggtatctttaaataagccgacttttaaatctttggcttcataaatcagtttaccatcaacataaacttcaccgtcagcgatacccataataagcttgcgattgataacacgtttgaaatcaattttataggtgacttttttggctgttggtagaatttgcccagtgaatttcacttcacccacacccaaagctcggcctttaccttcaccgcctaaccaacctaggtagaaacctaccagttgccacattgcatcaagccctaaacaacccggcataacaggatcattgacaaagtggcaatcaaaaaaccataagtctggcttgatatcgaattctgcttcgataaagcctttattatgggagccgccatcttcagtcattttaatgatgcgatccatcattagcatattacctgaaggcagtggtgggccatcttggccaaataattcaccacggcctgaagcaatgaggtcttctttagaataagattcgcgtttatcaaccattgtttatatagcctttatcaagtgtaaggtaacagaatagcttacacttgtacgctgaacaactccgatcacttgaaacagaattatctgaataagcgcaggaaccaaggtaatttaggcctatcctgattattcgcttgtgttattcgatcatgaataatagctaacaagtgttcatttgattgtggattttcacattgttcttcgtaataaggctgatgtgttagcaaagtaattgcttctgcaacatggacaaccggccaaatatggaacttattttctttgacagcttgtatcacgctatcgtttaaaacaagatgtcgcacgttcgccagcggtataataaccccttgtgatcctgttaatcctctttgctgacagatatcaaaaaagccttcaattttttgattaacaccaccaataggttgtacctgaccaaattgatctacggcaccggttacggcgatttgttgatcaatagggtgttgtgacaatgtactgattagcgcacataattctgctagtgaggcactatcaccatctacttcaccgtaagattgttcaaaaacgacggaagcactaaaaggttgtggctgatctaatcgtaattcagaatttaagtaggcttgcataatcatcatgccttttgcatggatattgccacctaattctgcttttcgttcaatatcgaccagttcgccatcaccaatatgagccacacaggtaatacgagttggctcgccaattagatcgggataaccgggataatctaagacagaaagaccgtttatttggcctaccatttcaccttcagtgtgaatagtgacttggccttgtaatatttcatcacggcttcgttctaataagtagctatgtcgccataaacgattttcttgcgcttttttaagcgcctcagcaccaagataagcgtcatgattaaaacgcatggcataacgcaattggcgtaatatgaattcaagatcgagagataagataagctgatcttcatgctctcttgcgccctgagtcagtaatacttgccaagcatcagcagataatgaaggaagacgatatttttggcaaagtccattaacaaaaccacaccattggctcagggcggtttcatcttctaaatacatatcgtattcatattcgccatatagcgccgtactgctgatattaggctccataaactcaagctcttctaagcttaggcgatcgcccactaaaataacacgcaagtgaaggggcatggcttcaataggcaaaggaagtgcttgatggtcattccacactaaccattcaaagcgttgctcttcaaccatctttttcagtcggaaccacattaaaggttgtgctaagagcgttttaatggataagactaaaataccaccattgactttatgcagcagtcctgggttaacgaggagcttatctttatgataataaaatgaaccaaaaagttgttcaggctctatccattggcaacaagcaatagattctgatgatgaaaatgaaccttctacattatcttgccaataaatttgattagactcagcttgataggcacctacaacaggataagtttttatctctgcttgttgtaatgtatcagcgagtgtttcgaaataagcagtagaatcttctgcttttagcagcataaattggcctgcttctgcattatttagccactgtaagctttcatataagcgaggttgaacctcacgaagtgaagatgcaggcaattgcgatgctgtttgaaagaaagtttggtaggaggcgtaatctgggcgtaacgcctgccattctaattcgttgtttttcaaggttaccgtttttattattgagtagtgaacatggaagttaacataaagcgttaatagctggtatctatcctgcaataagacagctattgacagttatattatgtctatacttttggccgggaatatacgttgccattacttttgctataacctattaaattgaatgtattgttttattatagcgacgcacgattctatcacaacgtggttagaaaactatcccttctgacatttgtcggtggtaggtaacaaaaactacttatcttttttggtgataatttaagcaaaaatattcggtttaaggcagttttttggcaaaattgttgatatgctagtatgtagttacgttgtcacggtgatttgtatgaaatatcaacagttagaaaatctagaatgtggctggaagtgggcttatttggtaaaaaaacatcgcgaaggtgaattaatcacccgttatgttgaaaagagcgctgccgatgaagtggttgagcaactattacgccttgaatctcaaccattaaaagtccttgaatggatcaacttacatatgaaccctgagttatcgaatagaatgaagcaaactattcgtgctcgaagaaagcgttattttaatgctgaacatcagcatacgcgtaaaaaatctatcgatttaacttttaaggtttggcaacgcctatcagcactatctcagcgccgaggtttgacattatcagaaacgattgtccagcttatcgaagatgcggagcgaaaagagcagtatgcactaaaagtacataacctaaaagatggcctaattgagttactagaacgagacaaacagaaaaaagagtagatgacaatagcgttgtttattatcgagagatcatcagtatagcgttaacttaagaggtatagagaatatctctgctaatcatttaaagtcatcatcaaaagaaaaaccctgccgaagcagggtttttttagaattcattacagtagatttctctactatttgaattattgaccaggttgaacaacaacttcagttgtaccttggatttcgatttctacacgacggtctggcgctaagcaatcgatcagagctgcacgagctttgatgttgtcacaagtgttgccagttactgggttttctttaccacgaccttctgcagagatgctgtttgcaggaatacctttagatactaggtaatcaactacagattgagcacgtttttctgacagaggcaggttgtagttttgagaaccgatacggtcagtgtaaccgataactacgacacgaccttgagttgggtcgatgttagctaattcgttgtacagaccattcagtgcttcttgaccttcagctttcagagaagatttgttgtagttgaacagaacgtctgaacgcagagtaaaggttttgttctcaacaactggagctggagcaactactggagctggctcaacaactggagctggagtttcttggttgaaacggtaagcaacaccaacactcagcataccattgtctggacgagcgttcagagtacctttatcaccgatgttgttgatccactgatactcaagacgagtagcaatgttaggagtgatcgcgtattcagtacctaatgcgaatactggagaaacgccagtatcattttcagagaaacgtttttgagttcctgctgaagttgcattaatagttgcagttgaatctgcacgccataccataccacctaaacgtgtataaacgtctaagtcatccattactggatagcttaatttagtggttaattggataccttgagctttgaatgcaccgttgttgtatgaacctttataagccatacgacctaaccagtcataacccagttcaaaacctaagtattggttgtactgataaccagcaaatgcaccagcaccaatttggtctttgtgtgtgctaccgttaccgatattcacgccgtcccaattgttaccagtactttgatactgagaccaacctaatttaccaccggtataccaagtattgtcttttggagctgcttgcgctgcagttgcgaaagctgccactgccactgctaatgcgatagctgtctttttcattttacgcctcgttatcatccaagttaggcatttggctttaagccttattatttgcccttggttaaattattgttaggaattcgatgctttcatcaaatgatgatccccaaaaacgggatttaaagcataaccttaacgatataaagtctacaatgaacttaaaaagttacaagtatccctttaaaattcgacttaaaattttaaaaagatcggccgttattcacaataagaattattctatatttttgttaaatttcttgtaaccatatgatttaagttacaattgattatgacttatcttaaatgataatgttgcgttatgagtattaggaaaactcttaaatttcactaatggtagtgatttgaatgaatttttatcgagtttaaatgtcgtttagaggaattattgttttctatttggatatgattactgttttgttgtcgcatgataaaacctaacgctttaccgatgctggcagcatattctaatcttttcatctcttctgacgatatttctggtaaccaacctaatactacactgtagtttccacttagtagcgctttctccattaattccacagtattaattgaatcaacatgattgagttgaatgattttattcaggggtaagccggtttcttttaaccaactacgatttaatttttgttgtggacttaaccacagtaaccaacgtgattcatggctatactgttttaacagaggtagtaagatgtggttaatcatcaagggattttggtaaagcagttcacttaccatgccttgtctattatcgggcattgttgttgtaattgcatcggaggccatagagagaggtaatacctcagtagagatctcttggaaaaggccattttgtcttgccaaagatgatgttgagagtttcatatttacctcgttcaatatgtactgtatgtatatacagtatacctgagtttcacttaaatcaagatcaattttttgaaagttgctctcaaaatttatgtaaattcatatttttgagcgggtaactattggcaaaaaaaggacatttatttattgtcttaaccatcaagaatacagtcatatatttgaattttaagataaaaaatattttttgtggtttggagatctgatgtcaattttacctgagcaaaggaaggctcatttattatcgcgcgtagcggaatatggaaagttaagtaagaagtctcaattcggcggttatagcttaatggttgatgaggttatctttgcgattactgctgataatgaattttatttaaaagggagtggttttgttgaaacactctataaagcaaacaacatggatgcatacgtctatctaaaaaaaggtatccccattacattgcgctattatcgtattacgcaagcaatatggcataatagcgctaagctcaatcaatatatcgattttgcatatcactatagtactcaggagtttttagggcagcaaaagcagcctcgtcgtatcaaagatttacccaatttgggcatagcattagagaaaaagctgaatcaagttgggattaaccgtatcgaggaattacgtacgatcggtgcgaaggcatgttatttaaaactgattgcgcaacctaagcaaggaaatagcgacttattgcttgcgttagcaggtgctattgttggctgtcatcggtctgtgttacctaatcaattaaaaatggaattgttaaattggtataaagagttatccgttaaatcctattaaactacagtactcggacttgagtacattagaatgaacaggaataacggaataagagcaaacttaagccaatagagtctgttattttctctaaggttctaatagaaattagagaaaataactttttatccatcaagctgtagctaatttatctttatcgttttgccattctgtttgctcaattagctcaatgcaattgacaatttgtggcaataaatccagtaacaagcgtatttgcgttaacactaattgaatacgggcgttatctgaacttggttgtgcattaacacgtgcgataagttgatcgtgagattgtataaaatcattatcttgtggttttttacgtctcaacgctgaatcaatataacagacagtatcattaagcagggtgagtaccgcttcatcttcaattttgcaacgatgaacacctaacgctgaaatatagctcagtaaagtatgatttaaacacagtaatttaaatgcttcttcttgagaggtttgaaagcttttaggctctgatgacatattagaaattaaagatgctaactcaccatcactgctatgtgcattacggcgtgcaatacgataattaacgctattatctcttccttgataatactgaatgaggatcgcatcaagatagtagcagttattggtcatggttttttggatgagcaatggcaactgacggaacttccaatccggccaaataaaactgactgcgaaccaggcaatggcacatccaattaacgtatcaatgatccgcggtagtgcgacatcatagccttcacctaataaattaaaactcaataaaacgagtagggtaataaacaaagtggcatgagcgtattgtacggttcggaaagcaaaaaagagcgtacctgtcacaacaataagcactaattgaccttcgatggaaggcacaaaatagagaatagggaaaccaattaaaataccaataatagtgccactgacccgtaatgttaatcgtctacgtgtcgcattatagttaggctgacagacaaacaaactggttaataaaatccagtatcctcgatgcaaatcaaaaaactggatgatcacataacctatacataagacaagtgacattcgtaccgcatgtctaaatagggctgattttggtgttaagtgaccctttattcttagcacgatatctcgccacccagtaagcccttcatcagataactgagtttcttctttttggtcatgagagatttgatattgctctgtactaatactttttaataaagcatcgatgccctgtaagttttgtaataaattatagagtggcgcaataatttgtggatcagaagtactgttttttacattattaagtgcattttctaaatgagtgattgcacgttcaaaatgaggattatgttggtactttttatgccaaagaatagattgagcgacttgttcgcaggctcttgcttgcattgacagtaagcgctgaaagcggaaaaggacatcactgtggcgtaatctatcactcagtaattgatattgaatatgagaagagctggcccgttcatgaatatcttgagccacaaagtaataatgcaatgtgaaacgactgctacgctggcccctatcaccttttaaacggcttagtaatgttagtttagtttggctcattgcctcaattaactgattattagccaatgccaagttatacagtaattgctgttgatcaccttcaatatcgggatcaaataatgcggccttggcttctagataagcggaaagctgctgataataacgcgtaaggctatcttgaacgggacgaatagggaaaagtaggtgaccaattaaggtaagcaaattataccaaattgcgcctaaaaggagccaaataggttgttcatgccattctgggaaaatcggcatacctaacatggtataaatagcgattaatagcgcaccaaaggcgatggtagcataacgctgacccaaggcgcctaataaaataaacccccaagtggagatagcaagaccacaaaagaataaaatagggtaagggtagagtaatccgatagatgttgatgctaataagaaacaacataaggtgatcacaaggtttcttaagcggcccacaagcctatcatctaagtcagttaatgcggctgcgacaacacctaatgtaagaggtatagtatattttggttcttgtcctaaagcccatggaaataaagtcgttcccgtaagtgcgattattatgcgaatataatataaaaagtggctattatagataaatcggcgggcgccattaaacaaattgaacacaaaaagcccttaaataaacaagatggagataattacctcttagaatatagggtttattacagataaaaaagagtttaacgacagactatttgttatttattgtaggaattacagaatggaactgaaatcaaccccaatgggacaacgtttagctcagcatccttataacagggtaaaattgttaaatgcgggtattgaggtcagtggtgaaaagcatcaatatttaattccttttaatgaattgatcgacattttttgtaaaaaaggcattgtgtggggagagttagagtttttactgcccgacaataaagtggttcgtttgcatggaacggactgggaagaaacgcaacaattttaccgctatctttatcaaacttggcaaatatggagccaagagatgagtgagataacggcgcaagtacttgaaaagcaactctcttctatccaagatataattcaaagcgataaatggataaagcaaaaccagttagccgctattcaacaggcaatccaagaaagtttttctgctcttcctcttcctctggaacgacttgctcaatttgataactgtaaggtgcattatcaacgctgtttacagtggttacagcaaggtaaggcattaattgcgcaagaaaatgagcaatggatcacccgtatattgacagagcatgcggagttttttactaccattgaaacatcgcctttaaatgaatcgcaatgtaaagccgttatcaacggtgaagataatatattggtattagcgggtgctggtagtggtaaaacgtcggtactagtggcaagagcagggtggttgttacgtcgtaaactagcaacctctgaacaaattctactattggcttttggacgtaaagccgctgaagagatgaaccaacgtttatctgagcgcttaaacgctgatattacggcgaaaacctttcatgcattggcattatttattatccaacagtcaactaaaaaacaacccaagatcagcgaattagaaatcaatagtgaaaagagaagaacactattgttaacgcagtggcgtgagcagtgtcagcagaaaaaagcacaagcgaaaggctggcgtgagtggttatctgaagagctagcatgggaaatccctgatggggagttttggcatgataaaaaattagaaaatcaagttgccgtaagattagagcggtggatcagtttattaagaatgcaaggtggtagccaaaaaacaatgattgattctgtgcctgcagaatatacggatgcatttaaaaagtatttaaaactattagcaccactgttaaaggcatggaaaaccgcattaaaagaagagaatgccattgatttttcagggctattacatcaagccattaatctgatagaaaaagggcgtttcgtcagtccttggaaacatattctggtggatgaattccaagatatttcaccactaagagcagcactattaaatgcgttaaaacaacaaaatacacaaacttcattatttgcagttggtgatgactggcaagctatttatcgctttagtggggctgaattattactaacaacagcgtttcatcaatcttttggtgatggtgctgagtgtgcattagataccacttatcgttttaattcgactataggtgacgttgccaatacatttattcaacaaaatcctaatcaattagctaagcctttaaatagcttaacaaaaggtaataaaaaagccgttgtattattgccggatgatcaattagaaagtttattaaataaaatgagtggttatgtcagtgacgatgaaacgatccttttattagcgcgttatcattacttacaacctgatttattgaaaaaggcgaaaacgcgctggcccaaattaaaattacagtttatgacttttcatgcttcaaaaggtcaacaagctgattatgtgattatattaggtttacaatcgggtaaagacggatttccagctccggcaagagagtcgattatagaaaccgctttattaccccctgttgaagactatcctgatgctgaagagcgccgattaatgtatgtggcattaacaagagcaaaaaaacaagtatggttattatttaataaacaacaaccatcttgttttgtgtcagagttaaaatctcaaggtgtccctacgcaaaaaaaaccataaggcattattttaaacgttcttttaaataaccttcatagtcgggaattttaatttttgactcttgtgaaaaaagaggggacgaaataagaaaattagccgtcgcacgattggttgctacgggaatattccaaactgttgctaggcgtaacagcgctttcacatctggatcatgaggaacggcattgagtggatcccaaaagaaaataagaatatcaattttcttttctgcaatcattgcaccaatttgttgatcaccgcccatggggccacttaacatctgagtgacctctaatcctgtatggtgattaaccagatttcctgttgttcctgtggcaaataacttatggtgagaaagctgttcactgttgtttttaacccattcaagcaatgagcttttacagtgatcatgtgcaactaacgcaatatttttttctgtggcgagtgtgcggtcaatttgttccatttgctacctttaaaaataaatacagttattattccagttgtcaacataccttttttttatcttacaagctatgagcggaacaagatactatgatgtatcataagattttcaatcttcctgctgataacggagcatataaatggttgattcagagatttatgacattctaagaagtgtcaaaacaattgcactggttggtgcaagtcataaagaagatcgccctagttataaagtcatgaaattcttattagagcaaggctatgaggtgatccccgttaatccgggtatggcaggggaaacaatattaggccagcaatgttatggtcatttgcaagatattcctgtggcgattgatatggtagatgtatttcgtcaatcatcagtagcgctcgagattgccaaagaagcgattaaaattaatgctaaagttttatggttacagataggtgtgatcaatgaagaagcaaaagcattagctgaacaatcggggttgcgggtggttatggatcgctgtcctaaaaaagagatagaagcccacggattgccttggtaataggcagagtaaaatcgccgaaatgtattcggcgattatcattaaggttaagaatggaagaaaattagtttcttaatcgcggggcctgtaattggttgcggattgattgtgacaactcatccattgagtcattatctaaatgctcatctgagagttcataagttatttgagcttcagctaaataggtatgaaccggttgtccttcatcatcttccatgacaacatgataccaaggcgctgatcgcaaggtcatattagatgcaatatcatcctcgttaggttgatcaagggaatattcagcatccacatcaacaactacacctaaataaccgagtagtttatgtctaacctgctggcctattccaaatttgctggcgatcatcatttatcacctccgtaaaaccttgctttattaatttctgtatatgagggcataaagtgaaatttcaaggtgtaacaaaattaaacacgtcgttatccagtgtaaatgcaaacctcacaaaatcagattatctattgtataaagaaaagacaacaatcttatcggaatttttgcgtcacatgtaagtttggagggtaggtaaatgaaggttggtagagaatatattattcaaggtcgtgtacaaggtgtcggtttccgctttcatacttatcaatggatgaaaaagcagcctattacgggttatgtgtggaatcgtgatgatggcagtgtggggatcaaagcttttgctgaagagcaggtactgagaaaaatagaagattggttggctgctggaggaccaatagggagtaagattgtattttggtcggcaacaccatgccaatatgaagaaatggcagacttttcaatccgccattatgcatcttagtattaaatacatttgacaggtttaggtaagcccgcgagcttcgttgcctgtttagcaggacctttagggaataagcgatatagataacggctattgcctttttcatcgccatatttttgtgctaatgctttcactaacattcggatcgccggtgaggtattaaattctaaataaaactggcgcacaaaacggataatttcccaatgttgctctgtgagttcaatttcttcaagttcagctaatattggcaccatctcttcggtccattcattgctgttttttaaataaccgtgactatctgtctcgatttgttgtccgttaaatacaaacatgtgtttctaaccaatcaaaaataatcatttaatttagcaaaaataaccgcaatacccaagtctaatgcgtaaatcgttgataaattaagctgttaaatcaaagggcgtttaaaattacgccaaacaagacaataagggctttacaatataagcgtggatgtttatattgctccccattgcggaggggtggccgagtggctgaaggcagcggtcttgaaaaccgccgatgggaaaccatccgagagttcgaatctctcctcctccgccatctcaatgtctcctaacatctcctagcgtatccttaacttcctttgatccactaaaaaatttcctagttaatagttttattcataattattcaaatttctgtttgtataaagagtattgagcattattgtaacctctaaatatttcgaatagattatggttgaatatatttacgactggggacaatcaatatgatgatttattgttatgatgacaaaataagtgaaattaaaatagaacaactcaccaaattgttatatagatgtgtccttggtggggcaagtgttgggtatactgacgcagaaactcaagtagatgatatgagaaattattggcttagtgttaatcactcattatcaacaaatacgtttaaattaattactgcagtgattgacggacaaatagtcggtgttgttggtcttgaattatgcactaaaccaaacggcacacatcgtggggagatttgcaaactattagtatcccctgatcataggcataaaggaatagcacagcaattgatgcaaaaggctgaacaaatagcatgggagagagggataacacttttaactttagataccattacaaaaggtatgacggtgagtctatatcgctttcttggttggcaagttagtggtgaaattcctgagtttgctcaagcagttgatggtaagtttgaggctacaaccattatgtttaaacttaagcctgagagtaatagttaaataaaaataagttaatatcattttgctatatatgatatttttctaaatacaccaaaataagccccagtcctagagcttatttttaaattaacgattaaaaaatttaattattaacaatcgttaatgtactaaatgatgaataagatattgtattcatcatttagtagcttattaactctatttccattatagagtgtgatagtgactgctttaatttgttgattaatttttaatttaccaaccacaaacattggcttcttcatccatatcataaccacggacgatattgattaaatctttaaccattagactcgccatatcaggatcaagtaaatcttttatctcgcattctttatccactgaaacaccattatttttattggtgagcgttaaagtcagcgcttgggctgagagatctattttgccctttaattcgttagttaataacaaaatttctttagcggcaacatcaggaatataaagtatcttaggattaaggaagattttctctactttatcattactgttatcacaaataagtgtcaataaataacctttattatcatttttcatagtcatttttaaccttcagcaagtattttggggtcaacataaaagtcgatattaaacacggtgtcttcagtttgtgcttcaattctgtgccaagtttctggtggaaatacaccaaactcaccctccttaatcactaaggtttcggtaggttttgggctatattgatcggcataggcataataaataatagtgccttgcatcacggataatctagggtataccccttgctgagtgcctttgtctaaatgtctctcccagattgatttaggggctgtctcccttgtccaaaaaggcgttgttcgtatatgaatatagtttgtgggaataatgatacgtttcattgcttctcccttattattgccagttattttgttgctttttatcttagtgaaaataaaaaacagagataaatcacctgataaattatttcttctttgaccaaaatttaccgccaataaagaagtatttcaaatgcaatttaatgatacttagatgatagttattcgatttagctctaactatttgtttttatttacttaaaaatattttaataaataaaaatttttttaagtttagctttctaataagcttaaatagggatttatgaaacttatttgggttaacaaaaaagcgttctctgtcctataatctatagatgtagggtatttaatgtttaacataatcgagatatcactatggaattaaaggattattacgccattatgggggtaaaacccactgatgacatgaaaacaattaaaactgcttatcgccgtttagcgaaaaaatatcacccagatgtaagtaaagagccagatgctgaggagcgttttaaagaaatagcgcaagcttgggaaattcttggtgatgaacagcgtagagctgaatatgacgaactttgggctcaccgcaatgatccgaaatttaaacaatttacacagcacaacaattcacattcaaaccaacaaagttttagtcaggaagattttgacgatctttatgcttctttctttggtcaaggttcaccttttgaagggcgccattcacgtcaagcacctagacaacgtggacaagatctagaaattgaattaccggtttttcttgaagaagcacaagaagagcataagcgtaccattagctatcatttaccggtttataatgtctttggcatgatagagaaagaaattcctaagaccttgaatgtcaaaattcctgccggtgttgttgatggacaacgtattcgtttaaaaggccaaggtactgctggggagaatggcggagaaaatggtgatttatggctaactatccgtattgcacctcatccattatttgatgtaaaagggcatgatcttgaaattgtggttcctattgcaccttgggaagccgcattaggtactaaaattgctattcctacacttaaagataaaattttacttactattcctcccgctagtcaggcaggtcaacgcctgagaattaaaggaaaaggcttagtaagcaagcaaaaaagtggtgatctctatgccattttgaaagtcgtcatgccacctaaagtggatgaaaaaacacattcattatggcaacaactcgccgaagcccaagccgattataatccacgtaaaaactgggagaataaataatggcacaattaacaacaatatttactatgactgagctttgtcatcatactggtgtttccaaagaggaacttcaagaaattgttgaattaggggttattgagcctgtagaaatcaccacccaggagtggtttttcaatgatgatgcagttgttgttgtacatcgggcgttaaaacttcatcgagagttagcattggattggcatggtattgcaatcgccttgacattgttggatgaaaatgaacgattaaagcaagataataaacaacttcgacaacagcttatgcgctttattaataatgaataaagtgtcagataatatatcgctaattgcttgagaaaaactaactataaaaatatagaaataattttttaaagcaattagcgtatatattatataataagagtgattcgttattaggttattattcactcgtttctaaggtcaataatgaaagccacctcagaagaagtccaagtttttattgcagtggttgaaagtggtagttttacacgtgctgcagaaaaattagcattagccaattctgctgttagtcgtacagtaaaaaaacttgagtcaaagctaggcgttaatttattaaatcggactacgcgacaattgagtttaacggaagagggggagcattactttcatcgtatgcaagttatcttgcaagatatgaaattagctgaagatgaattaattaatacacaaaaaacaccacagggtctattacgtattgatgccgcaacgccggttgttttgcatctactggtgccttttattaaacaatttcagcaaaaatatcctcaaatcaccctctctttagtttcatctgaaacatttatcaatcttattgaacgtaaagtagatatcgcgattagagtcggtaatttaacggattccagtttacgggcaaaaccactattgaatagttatcggaaaatcgttgcgaccccggactatctcgcccgttatggacagcctaaaatcgcagaagatctgcttgaccatacttgtctaacttttactgaaccagtatcactaaacacatggcctattgagcgagagaatggacaattattagaagctcctatgggaatatcgtcgaatagtggagaaacgataagacaattgtgtctcgaaggtaatggtattgcttgcctttccgattttatggtggttaatgatatcgaaaatggtcgatttatcgaattattccccgataagctgcgacctatagctatgccttttaatgccgtttattatagtgaaaaagtggttagccaacgcatccgtgtatttattgattctctgagtgagtatattgctaaaaaagtaggttaaaacatataggtgataaaaataatatcacctatattacgatttaaattggttaatcttaatcccaatgaggcgctaaaccttctgggctaactaaacgatcatgacaatctaactttgcaatcgcttgtttatcttcactatccaatttgatatttacgctgagtaaattactggctaaattttcacgttttgttgaagatggaataacagaataaccttcattcatagcccaagctaaaatgatttgtgctggtgttgcattgtgttttttagcaatggtttgtattgtttcatcttttaatgctttgccgtaagctagagtcatataagatgtaatatgaatgccatgctgtttagcccaatttaccactttatgattttgtaaataaggtgataattcgatttggtttgttgcgatattttcaacaccaacggcagcaatagcttgttccattaatggaatggtaaaatttgaaataccaatttctcgcgttaatcccatctgtttcgcagctaataactcttgcataaattctttaacagaaactgcatcatttggtgatggccagtgtactagagttaagtcaacataatctgtttgtaaatcacttaagctttgtttcaaactaggaattaatttatctttacttaaattttctacccagatttttgttgtgatgtaaagcgcgtcgcgagatataccactttctgcaatagcttgtcctatagcagattcattttcataaatttgtgctgtatcaatagcacgataacctagttctagtgcagtttttacagaatttataaccgcatcgtcttttaaacgaaaagtaccaagacctaaaacgggaacactcatacatctctcctgaaaggtaataacagtaggggaattaagttgatatttgtgacaccttattgggtgcctcatcgtcatggtggacagtatagtcttttttattgttctaaaaacaagctataaagcaaaagacttttgtgataaaagcaataatcaaatatatcagtttatagggaataaaaagttcttggtataaacataattaaaaataaaataataaatttataattatattttaggtaaataaatacgtttttttattaacgatatatcatatgattatattttaatacacaattcaaccaacatagtttgcgatattttttaatatttgactacatcatataatattatttgattttatatgcactataaaaaatggttgttaggctgatgcgatttttattttttaaatagttaatcattgagatgttaatcacggtaattgattgtttctcattgctaatattctgcagaccaaaaaatatcaagttttttactctaaaatagagataattaattgagatataaattataaataacaagcaaatgaggcattatatgtttttatttaaaaaagctgttatcgctttgtcaattaatatcgcattagtttcttcggctctggcctgcacaacgttattagcagggagtgaagcaactaatgatggctctttgattgtagctcgtagcgcagatagtgatgctttaaaagcacaacattttgttattcatccagccaaaaataatcagactggtatttatagcactcaagcccatcatggcgctaatagctttacttatccactacctaaacactcattacgttataccactgtacctaattggaaaactcaattgcatggtgcaacgggttttaatgagctaggcgttggggtgagtggtacagaatccatttttgcctcacctaaagcattggcgttcgatccttatgttgaagatacggggatcactgaagatgatattccagatattttactctcaagggcaaaaactgcccgtgaagcaattgaattactgggaaacatcatcgaaacacaaggtgcgggagaaggatttggggttgccgtcgttgataaaaatgaggtgtggtacctagaaacaggtacaggtcatcaatggatggcgcaaaaactaccaaaagataaatattttgcaacgggtaatcaagggcgtttacaggcttaccatacagatagtaatgataatttaggttctaaaaacttagttgagtttgcaatagaaaaaggactttatgatcctgccactgatggcgaatttaatttttctaaagcctatacgcgtgatgatgaacgtgatctcacttataattacccgagggtttgggttatccagcaacaatttaacccttctctgaaacagaatgtggcagatggtcgtcaatttgcgcctatgctgacaccggagaaaaaagtatcagtagaagacgccaaagcgatgttacgcaaccattttgacggtacagaacatgatccttataccaatggattgaatggcaatgaaccatggcgaccaataagtgtgtttcgtacttatgaatctcatgtgatgcaagtaagacctgaattaccgcaagagattggtgaagtgacttatgttggtttgggaatggctgatctaaccgcttttgttccttattacagtggattaaaagcatatccgcaacactatgctattggaacagataaagcagataatgactctatctattggaaatatcgtaagttacaaacattagtaatgacagattatcctcaatttgctcctattgttaaaaaagcataccaagaatgggaagctaaaacagcattagaacaaaaagaaatggaggctaactatttgtcaatgagtaaaaagaataaagcagcagcggataacatgctgaatgaatttaacttacgtgtaatggctgatgcagagcaattaactgaaaacttaactaatcaactctttactcttaaaactaaaaatatacaagatgagatcttttttgctaatcaatctaaaaaagattaattactttaacatattataaatattaaaaagatctcaagatgcgtaatcagattgagatctttttatttctattagcgactaaagaacaggaatatagtaactaatttcttgtagatgctgctcactatggccgattaacttatcatagctaaccgattgttttaaggtataacgctcaatatcaggaccagctcgacgtagcaaattcatctttggcaatactttggtatatacagtataaataatatcatcatacccggtgagggaatctaaaatattatccatctcgaaagtaataactaaatatttcccattgggtaattctacgttagacatagtggaaatattagcagagcttgttaattgttctttacttactgctgttgtataaatataagtcgtatcatctagcgagcctgcagaagcacgatgtgtggcatacatttctgtagggatggtatgtatttcttttaaaaacttcttccaaaattcttttctaaattttttcttatcataattccatgctgaaatatttttattgtattgatgagccatacctatcaactctttagaaggtaaggtcattacttcatattttgctttaagttcaaccgtttctaatgctggaaagataagctcactaatatcccaaccttgctttttcctgtattcagaaggggtgatattaaattgttttttaaacgcacgacaaaacgtttgttgcgaatcaaaatggtattttaaagaaatatctaaaaggctactacgagtgatcctcaacgcataagcgccacaagataaacggcgtgctaggacatatttgcctaaagatattcctgtatatgctttaaataagcgctggaagtgccacttggtatagcctgatttttcagcaataatatctaatgataaacgtgaatctaagttttgctcgatccaaacaatgatatctttaactacattttcttgaagcattgatcttcccactatttcactttatcgatattattagattaatctattgaaaattaatcaaattattattttacaataatatcatattaggcagattctgttactctaattatggtaaaagttaataacaataatgtaaagttatgtatttgagttggtttattcttaaaaattaagctagtaaaactaatctagactattatacagtgggaaataattgcttagaaaatcgcttatttctttatattccccctataattaaatacggagatatcttattttttattttaaaaaagctatctaacctaattggactaaccatagttactttaattattttaggagatgtaaatgcgtaaattactttctatctctgcaattgctttattaacttcaattattgcaacacctgcattagctgctaaaacagaaacttacgactgtgaagggcaaaaaatcagagtttctttccctaatgatgatttggccgtaatggattataatgatgaattaatcgtgttaaaatctgccgtcgctgcaagtggtgcgcgttatgttggagaaagtttccaactgtggggtaaaggtagtgaagagttcaatttagcgacgatgtcagaagatgaaatagttaatgatcttattgctgaagatacagggcgtacttgtaaaatagtaaaataatttaatgattatttattgagataaaggcgagctagactcgcctttatttttaagtcattatatattttttatcggcagtttgttaggatatctaaatatcgattattttatctcagataaaatataactgtataaatcaatgcatactgagagttaaaatgaaatcttatccttagctagtttcaatattaattttaatatcagttttaataagaaactgaaaaataattattatatctatcattttttaatgacgggtattctatctataaattaattttggatacagtctaatgaaagttacaagtgccgaaaaacatgcattgttattaccagataatcgaacgttaacttggtatgaatctggcccatcagatggtcaaccggtattattctgcacaggtgcagggatgagtgggctattaagtatggatgctgatctgttaactaagttaaatattcgacttattacaccgactcgtcctggtttaggtgaatcaacttttgatcctaaaaagacattaaaatcgttttctagcgatgtattattcttattagcatatcttaatattaagaatatcagtgtgataggatcctctcaaggtgctgtttttgcaatggccatttgttactatggtaaagtggataagctggcaattgttgctggtcaagatcaactagattatcctgaaataaaaaaactgttgtccagtgatgtggttaatatgcaacaacaggcattattcgatcctgatggattaaagacctggatcattgaaaatatcaccgctgactggttaatggattttattttgaattatagtgctgatgttgatttggctctttatcaagaaaataaattttttcctgtttatcaagcttgtatgaaagaagcatttaaatatggaaataagggctatgctcaagatttattaatcacgatgcaaccttggggatttactccagaaatgattagcacacctacaacattatggtatggactaaaggatacgagtactgttcactcgcctgattttggcaagttattgtctcaacgttttccccatgcacaacgttatgtctatgataatgaaggtggctctttgttgtggactaaaacatcacagattttaactaatcttattagttaatctgagcaaataagcaataaaaacagtagatggtataaatatatcagtagatattgattgttttgtaaaattatcagtatctactttgagtaggcttattcccaataaatagctatctatttgtaaaggttaacaatttcatggtaaataaatcaaataaaaaataaatttacacttctataaaaaataaaagtgaaaatagtttgctataaaataaattctatgacttaatagcgtcattggtttggaagtacagacctatttatgttagtccagtttttagtagttcaccgtttagcgctatccttgatacctcttcgttgcgaattccttcaaatagtacccataagtaaaaatccgaaatcaaaccgcaattagccttatggcataactaaatttattaaaggaaattctatgtctaatacaatgactggtacagttaaatggtttaacgacgataaaggctttggctttatcacacctaaagatggtagcaaagatgtatttgttcacttttcagcaattcaaagcgatagctttaaatcactgaaagaaggccaagaagtatcattctctattgaaaatggtgcaaaaggtccagcagctgctaatgttatcggtctgtaataattatggattattgcgtctaagacttaaagacacttatataagtgtatcttactagacgaaataacttaaaaacctcactgatgtgaggtttttttatatctattatttgctaataaaaataaattttattctaactgatattattaaagtttggtaaatattcaccatacataaaaaaagaaaataaaaataattttacttactttgctattacatatttttccaaaaagattagaataaaagcaatcagaaaataaagctatgactggtagtttttttttaagaaaagaataggaaaaagccgtttaaaataaacttatataagataaatggtaaattttattaagtggtattcactaagtaacttatcttaaataactgttgtctaaattaacttaagcttaaaagaagtcttttaagtgacgaaaggacaaatcttgtgtacgctaaaaattctttttcactacatctgttacaccctaaatattttcttacttggctaggcgtatttattctttttttattagtacaattaccttacacgtggcttttattcttaggaaaacatttaggattactatcgcgtttttttatcaaaagaagagtttcgataataaagaaaaatttagagttatgttttccgaataagagtaaaaaagatatcgataagctagttatggaaaatttatcagcattaggtatcgctttattcgaaactggcatggcatggttttggagcgataacagactgaaaaatatctatcaagtcgatggaataacaaattttactgaggctaatcgaaagcataccggtattttgttgattggtattcactccatgtcgttggagctaggagggcgtattatggggttgtgcttccctgtaaacgcaatgtatcggcctcataataataaagcgatggagtttattcaaactagggcaagatgccgttctaataaaggtatgattgatagacgtaatttaaagtttatggtcactgaattaaaaaaagggaaagccatttggtttgcaccagatcaagattttggcttaaaaggaaccaccttttcaccatttttttcggtgaaggaaacgtctacttcaaaaggcgctgttatattagcaaagttatcaggagctccttctttaacggtaacattggtacgtaatcatggtcatgataataaaaaatatagcttaattataggtaaagagcttcataattatccaacagaaaatattcaaaatgatacagatagaatgaatcatctgattgaaattgagattatgcgagcgccagagcaatacttatgggctcatagacgctttaagaccagacccaaaggtgaagccagtttttattaataaaaaaagaccaacacattaagtgttggtcacagtaaatactggaagcaatgtgagcaatgtcgttgcaaatagtttagtaaaacactcaactattcacgagttaaaagataatcattctcaactagattgtcaaccttaaattttataaggggataagtagtgtgagggtaatgtaaaggcctactctagatgccttggtgccttgtataattttttctttttaataagatacataaaaattggtacagactaagggatattatgcagagttatcactctctatcggctcaagtttatcaattggataaaccgataggatgcagtttcggcgatgttgaatactatcaacagcgattaaaagatgttaaaggtaaaattttagagccggcagtaggaacaggacgtatccttattcctttattgcaatcaggttttaatattgagggatttgatctttccgaagagatgcttgaattttgtaagaaaaatctaatcgagcatggatttacaaccaactacgtaactcaaaataatttagtcacttttgaagttaatacccctgtcgaggctattattattcctacagggacattcctcttattaaatacgcaacagcaggcgatccaagccttaaaacagtgttatcaagcgcttgagtttggtgggcgcttattggttgatattagtcttgcccatcattttgttaaaggtgaatgtactagtcgccaatttaatacaccagaaggcgatctaattaccttacagataattaatgctgaaattgattatataaatcagttaactacttcacaccatcgttatgataaatggcgagatggcaagatcattgaaagtgaatgggaagttttcagcttaaaatggtttggtgtgtctgaatttgaacaaatactacgcttgattggttttaaacagatcacaatatcagccgattaccagtatctgcaaacccccagtaatacgacagaaattatgacttttgaagcgtataaaaaatagcattaaataataagaggctgtatttaaagctaattttttatagcctcatttatttcgcctttctaaagttaatcagaatattggcagttgtatttttatgtgtggaattataacgttgtaaggcgtccttttaaggaataactcacatgaaaacacccactttattaaagcatggcttaatagctactttgacctttatggtttctttgaattccttcgccgatcccggaaagggtaaaggtaatggaaacggtaacggtaatcctcatagtcatcaaaatcaaagaggtaacaacggttttaataaaggacatcagaacgtaaaccaacaagatggattttcttcacaactgcgtattgatagtcgaggagggctctctgtctcaatcacttatgatgatgcaagagcattagcaataaagaacaatctaactggatataaaggccttcctccgggaatagcaaagaatttaacaagaggtaagccattacctccaggtattgcgaaaaaagccgtacccagcattatgctaagtcagttaccgcattacgatggatatgaatggcagatagtgggtaatgatttggtgttaatcgcaataaccacatcaattattgcctctgttattaataatgtttttgattaaggtaaaacatagcctcattttaatgtcatgttatatctgcttcaaaactataaaaccttcctactaacagggaaggttttgtgtttattgaaaggcaaaaataaaaaaaagaccaacgctaggagagttggtcaataaatactagaagcaatgtgagcaatgtcgttgtgaaagaccgagtaacgcactcaactattcacgagttaaaagataatcattatcatttgggttgtcaaccccactgaaattgtgactactattttttgatataaaaaaccaagtgcttagctattttataaaaacaagtgttgggtttttattaataataacaagtagatctgcttctttattacaattaatcgccttttctatggcacgcattttttttatcttttttgctaaattcttaacatgttgagagcgtaatgacattgttggtttaaccatgatatttctccttagtagtagaagagataacaatagtagggatattgactaaatgcaaatgataattaatatcatttgatagctattaataccctcacttattaaatgtgatctgtatggagcgtttttattgcaatttttcttgttttttcccgtcaatagactaaaaaataaggataaagtacttgagataaattttttatcagaactaccttctgcaaatattctatttagtgctataaatctcaataattaatattaaaaattactccgtaaatatagaagtattatattttgtataatttatattttaaccatacttcatttgaaattttttatataagtagtatggtagttagcagctattaaaaaatagcaaagaaataaaaaatttatttttaataaatctaagaggaacccatttactctaaaataattgaggaaaataataatggataatagtgataagtttttttctaacgatatatgtcctaaaactgctttatatggacaattttatgggaatgatcaatacgcaggccgtgaacacgaaagaaaaatatactacggcagaaaatttcctaaaactaaaaaaggttattattttaaaaagctaatgaatttttaataataaaaatcattatattaaataatatattttcgaagtatttataagatgggtagtcttatataaggttatccatcttggatgaatttatatatttatctgtggatattatataaatataataatttaaaaggtatagtccgtttagactatacctttagtgttattttatcgagcaattaatgcaaataccccccagcctaagtattctcgtgtaaaactaacatgacgtttaggggctatggtcaattccgttcgaatttcttgagcaaaatcatcggcactatttttgtcaagccaacggcgcatagtcatccatttagcagcttcatatctatcccaaccctcttgatctgccagtaccatttcgactagatcgtatccttgattgtcgaaagaaataacaagctcagataaagttaaaaaatctgatatggatgaagcaccacaagcttgtgctatctcttgtgttgttggaatttgtcgccaatatggttctccgataagaataagcccacctgttttaatactttttgctagtagctcgatagtttcaattacaccaccagcaatccaagttgctcctatgcatgctgctatatcacattttttatcactaatataatctgaggcatcatgatggataaaatgtactcgatggctgacgcctaactcttctgctctagattttgcttgtagagtaaacaacgggcttatatcgatgccaatacctgtaatattgtaatcgtgagcccaagtacatagcatttcaccagagccacttccgagatcaagaatttgccagttttctttcattcgtaatactcgacctaaggtggcatatttctctggtgtgaaagggttatgaatacgatgctcactttcgctaatagtgaaaatacgaggaatatccattttaatttcctttaattgttataaaagagagtgtggacattattaaacctagtaatattattgatataatattactatctaactgatttaatttgctttttaatttttttagaaaggtaagcttatacgttaggacatctagattttggcaataatctttaataagagtgatacaactagctatagcaccaataaacgtaaattgggtagaaataagtaaagaatagtatttttgatgtgatggatccatactagaaaacctgtttaatcatcatatgcaatataagcaaacatattgtggtgcttgcatgagaatacagcgcattgaaaccagctattcgccctaaaaggtcgaaatagtggttattagatgattacattttccagcatcaaagcctcagataggaattaaaagttgtttacactaggacattttcatcgattttttagatttgtaaatgcgtaagtctgtaaagtgtgagccagatgatagttttattttggttgagccatctatttacaatatatcaaagtaaaagatagtgaacagggggaaccccgaaccttggccgacgcttatcttgcagaccaaactatttcatgcggtgttttatcaggtgtatcgtaaaaccttgtcctcagtgaagagagtagtgcagaagctatgtttaataagaatacaaaataactggttataaaaacagtacttgcttgtgttgtgtccgtgattatcttattatttttaaatcgtgggtgacttattacttaccatactaaattttatcaatacctagggtatacaggtattaaacttattattttgataatgtgtatctatataggaggatgagtgaaaggcaaaagagttgttattgttcatggctatactgcatctcccaaggataattggtttccatggttgaaagaagagcttggatcattaggatatgatgtcagtatacctatgatgcctgagcctaatcatcctaaccctaatgagtggcaacaaaaacttgccgatgaaaacataatacttgataaagatactattcttgttgggcatagtctgggatgtataactttattacgttttctttctgaacaggcttgtgaagatataacaataggcgggtatattttagtcgctggttttaatagtgaacaaaaaactttacctgagttgaactctcatatttataataacctgaattatagtaagttaattaaaatatcggataaaagggtatcattaatatcatccaatgattggattgtgagtcctgattcatccaaaaaattagctagtcaattacaaactcaaattgttattgaagaagatgcgggacattttcttgataaagaaggctatattaaattgccagtcatgcttgatatttttaaatatatgctgaatcaatataagctataaatacaatatcagaatattcgtcaattggtttttatcagtcatttaaataaaagaaagaaaagtcgcctttacctttataaaaggcgactgtttactcagcgtgtggtgttatttaatggcttttctgtgaaactaaaagcccaatccctgcactagctaataaacttgagcacatacgattgaacacttttttagcatgtggttttttttgcaactttttcatgtgtaagcctaaccaagcgtagagcattattgcaataaactcgagtaacaagaataaagaaccaagtattagaaactgggaactagccggtaattgtgggctaacgaattgcggaagaaaggccgtaaagataagtattgcctttggatttcctgctgcaataaaaaactcttgccttgctaataaggttattactcgtaattaagatgaagcacttggaatggttgcacagcatttaggtatgttgaaaaaatagaattaactggtgccgatggtgaaccaattcaagcaactgggattggcctagggcacctaagttttgaataactaatgaagttgaggagtaaagatagaaattaaatgggcagcattattaaaagctccgttcctgatgaagttatatcagtaacacctgcttttttagcttcttcacgtaaatttgtagaggcccaattaccgcagaaaatgaaaattggagtttgaattttaagatctcttatttttttgtaagagttatgctagctcgatcgtcttcgggtctccccatatctgatattataacatcaaagttattgctttttattttttcaatggcatcacttgttgaaagtgaagtatctacatctatatgatttatttttagtgtttcaatcaaatagctattatttgaagggttatcatcaacccataagaccttttttttcattggaatattaggcagtgaaattttttctgaattaggatgtaatgtgtgtattttctttcccatttcaacaagtttagattgtagatctagaataatgtgaccttgttgtattgaattttctttcaaatttagttcaaatcctgaaatttttatatttaacttgccatcaaagaaagtatctattagctttaatagatgctttctaaaataaaaaattaaaaaacatacaatcaatggccataataaagaagatattaccacattcccgttttctggccatgacgcaagcattacgcgatttatatcagaagaaaaaaggtagtttctttacaactaaaagatgatagagattacctcgcctatacaggcgaggcttataactattattaaatattcttttggagttctttacgggttgctgtggcaataaatccgctacgactcccatattcaggatttgtttttacgatagtatcgatgcgactcaataatcgatgtggcaatgtgatattaatacgctctgctcgtccgtcgtatttatccatatcaacatcaactaaaagccatattccattattgtaatcaccactagaattaattaaatgctcttgttgagattttggagaggggatatctaaacccttctcgcttaacaattcaaaatgggcatcaatagcgctcctcgcatctgcgtgagcttcttcaatactgtcccccgcaaagatgcaaccatcaatatcagggaaccagccacttgcgctaccatcttcatcaatttcaataaaggctggatataacataatttcatctccataaagagcgcgccctatatgagcgcattcttaattaatttttcagtttggcacttttaataatttgatttaatgttcctttttttaaatcttttcttggatgcggtactgttacaacaaaagaaaaatcagggtgagtaaattgatgatgacttccttttattctatcaagtatccatccgtttttttctaacaacttaatcagttccgaacttttcaaactccctccattccgtcaactgatatacacactatacacactaagacgtaggcaatcaaatattttgtgtgtatggtgtgtattttattatctataataaaagatttgccatgtagccgtttaaaagaaaaaattgcagagcagatttcaccgccacagaggtcagcattcacaactgacttatatcctgcgctggcgcgagaacaaggctttgatgggattgatttaccccagcccacaattgcaggtgttgcgatggatagcattgatagctatgtgccctcatttaaaggggaacaagtttacggtgtgccagagtcacaggcctcatggtatgcctcacaaatgtttatcggcaacaatatgtgtgcggttatcgctaaacactggctggtggataaagcctgtaatatgcccgcgcgtgatgcgatacgtcagggttacgatattgattgtgataacgacgatgatcgtgctatcagtaaaaagcatcgcaaacgagataaaaataccgcattacacatcagcttaaagagcaggttcactttgggcatgtatacggtgatcgtttagcattattcgttgtggagacatcaaatccgaaagagtggtatgaaaacccgtttaatatcgatggtgtgaccaaaggcatgtacaaggggattaaacagattgatccacaatgggtaacacctgatttaacggacgccaatgttcaagatcctgccagcatggatttctacgaaccaacctattatgtgattggtgggcgcaagtatcacaaatctcactttattaagtttgtaccgtttcctgtgccgaatgtcttgaaaccaatgtacaactactttggtgtttctgttcctgagcgcatttatgagtgacacactatgcaacggctggaagtagctacacaaaagaggaaagtgacgggcgttatcaaggttagggaaattatcaactagcgggcaattatgcgctagtaggtgcttcgtatactaaggctgagtctgacggtaaatatcagcctaaagggaattatgtcccagtaggcagtagttatactaaaaatgaatctgataatcgatatgaaaaactaggtaatttaaaacagtttaaaaagcctacctcaacagttaatgcagataaaacaatagttaaattcgaatcaaatgtgattggtaaacagctttttgctattgctagcgataatagggcatatccttttactgtgttaccacctccttataaatctctcattttgtggtatggtggtaatcagttctggggatcaaccgttactgcatctagtgatggaaaaacactaacgatacatcatccaggctatacagggcctacagatatgtatgtcttggagtaagacagaattacttaaaatttttatcatacggacaccgatagagtgtccgttattgagaattataaattaagtaatttacttttttgttcttggaactcttcttctgtcagtacgccactttcttttagttttcctaatttttctaattttgatagcaagtcatcaccactgttatttgaagattgcgatgaagagttattttttttagataggataatatcaactagtggttgtactgagtttttttgtagtgtaccaatttcataaatagtaccaggagtatttatttttattttactcctgtcaatccggaagatgagtcaatagaagtaattgcatcatagtttactgaagataaatcaacttttttatggaaaatcccactttttttatgcagaaaaataattcgtttatttgtaggtatgatcaaccaaatattagattttacgattccgctattaacacataaaactgtttcatcattatttaataattcaggtaatctagtaaatatatcaaaaacacccattgttgatttataacttgttaatgctgtaagtcgattaaactcttcttttaattgttttttatcgcattgttttaagtccattataatctctctttttatctaaacactaaagaaaatttaatagaaatagatactaacaaactcctaagtaacaagcgagaaagatggttttaaattactcaaactacataagttttttatgttttttgatgttagtaccatatttttatgattgaaatacctccccaacttctcaaacaaatccctcgccacagcctccgtcatatacgtcctcatcggttccctacgaacattcttcatttcaaacgtattcttatcaaaccttggatcagaaaagacaatatccataaacagatagccacgagggttatctacagataaacgagcttcttctaactgagcaatatattccgtattattgatttcaagcttaatcatagtatcacctatttaactgtgtttttatacagtaatttatataagcaatgaatagaatagcaaggagaaaagggcaattttatgagctaaagaaagggggattttgagagatgatctgtcgtcgttttaccagagttttaccagagttttaccagtggcaaattccagacataaaaaaaccaaccgtaagtggttggttttcttaaataaaaatggtcggcatgataggatttgaacctacgacccctgacaccccatgacagtgcgctaccaggctgcgctacatgccgattgtgcttagtatattactgttttttactgctaaagcaaccccttagatacttaactgctgtatttttattcattatagtgacgtcagttgttattaactttttacttatagtctttttttaatactaacgctcaataaatcgtttttgctcagcaagtacttgcaataataggcgtaaatcaggtttggcggattggatctctttgcctgatttatcaaacaaagcatatctgccatgtttatctatcattaacgtattatcttgtaaaaagaccactagagtttcattatcaccagtaaaaatccaagggtgattacgcgtattagcaaatagatcttcgccttgagaatagttatctgcagggctaataacacctaatacatgttgcattagcgttgtcattatatcttggtggctggttagtttatctagtttttgtggtgtaacattaggccaatgtattaccagtggaacctgcgattggcttaagttaaaagtgtctttgttaacaagccattggctatcttgtttatcattgttctgatgataatttgacgttacgaccacaacggtattatcaagtatgttgctttcttttaaagtagtaaaaatggtctctaattgactatttaactgtgcttgagaagctgatgtatgcttatcaccgttgatttgtaagaaagagaaccaaggtgtgctttgtttattttttaacaaccatgaacgccaactattaatcgttgtgtcgttatcctcactacgtgaagtaggtagtgagtaatcagccagcaccgcttgtgtaaataatggcgatttaaatccgttagttgaaaatagtgctaattgatagtgacgataatttaaagcgtcaaagagcgctgagtttttgcggctacttaacacactatctaagtaagacggtgaaatgccataaaataatccaaacagcgccgtttcgttatttatgcctgctgaatagtgctgagagaaagagaggttattatcagcaaattgttgcaagctcggtagtttggcaacgtcttcattacctaatccatcaaccacaatcataagtaagttatatgagctttcatctttagaataatcaagaggtgtaagcgggtaggtgatactctgtgccgcaggattaccctcgctcattaagcgctgctcatactcagattgattaataaaaccatgccgttcaaggaatttacgtgcagtcattgggtaagacagtggtaagtttgcacgttgcatagtaatagggcgataaaaattagcatctgcccaaatagacatagagtgggataaaataaagcaactaataaatacacaggctaatggttttccccatcgctggcggtttaagctgcgcagcttttgccaactccatgtagcaaatagcatttcgataagaaagataatggggatgccaataaagataagttgccattctcgcgccatttcaccttcatctggattgataaccaaatcccaaaccaactgggtcaaatgaagttgaaattgctggtaaacagctatatcaaaaataagtaatgtcaatcctgcgctagctaaggcgcaggatatcaccctaagtaatcgttgcgaaactaccacaaaggtcaacggaaaaagaataaggatataaatagcaaacacgataaaactaaaatggcccatccaactgacaatagcgtaaagacgacctgcaaaggtacttggccaatcagcaataaacaggtaacggctcccaagcaaaaggcttagaataatattaaacagcgcaaaccagtgaccccaactgatcatttgggatactttttcacgataggactgatttctcgttaccatgtctataaatatttctgtgtttattagtgaatattgccttcatcaattgaagcacgtaaagcgtgaacaaaagagtctgcaatcagcattcgttgagcaggggcaatacttgtattgattaagtttgtcaccatgttccccaacaccatcaaagaaagatctgtaggagtatgatgtttttcaagaacgctgacaagttctgcaagtaattgctcaacttgttcatcactataacgggatttttgtggcataaaatctgaattcctactaaatggataaaacgctatatgttaccgcaaggcgtgttatttttctgctattaaattaattattttgcggttataccccttgatagtaaaagtaggggatgtttgaatacgcgcacaaaaagaatcgggataaaggagggcgcccatgagtctagatattaaccagttagtcttgcaccaacttattaagcgtgatgagcagacattagaagtggtacttcgtgattcactcttagacattgagccggttgttcaagagatggtcgaagagttacatcgtgtttatagtgcaaaaagtaaagcctatggtttatttaatgaagagagcgaattagctcaagcattacgtttacaacgtcaaggtgaagaagaatttttaggtttttctcgtgcagcgacggttagacttaaagatgagttagcgaaatacccttttgctgaagggggaacggttcttttttgtcattatcgttatctcgcggtggaatatttattaatcgctgtattgaatagctgtaatagcatgtgggtcaatgacagtcttgatgtatcttcaacacgctatttagatattcctcatgcagatattatcgctcgtattgatttaactgaatgggagacttcacccgattctttacgttatttaaccttcttaaaagggcgtgtaggacgcaaagtttcagatttctttatggactttttaggggcgcaagaaggtttaaatactaaagtacaaaataaaggcttattacaagcggttgatgacttttgtgaagcatcagacatgaataaacaagagcgccaaacttgtcgtgaacaagtctacagctattgtaatgagcaattgcaatcgggtgaagagattgcattaactgaacttgcacaagagttaccgccattaggtgatcaaaactttgcacagtttacagaagaaaaagggtatgaattagcggaaacttttcccgcagatcgcagtacattacgccaattaatgaagtattcaggaagtggtggggggttaacggttaattttgatgcgaaactgttgggggaaagaattttttgggatcccgctaccgatacactgacgataaaaggaactccacctaatttacgcgaccagttacagcgtagagtctcagaaaaataggcaatagatagaaacaaataacgccacattaagtggcgttacatgctcggcgtcccgaaaaataaagctcgaaggttggcttattaagcgcgcaggaagtcaatatgagtaatttttggcttatactcgtgacgttgcactgctttaactttaactttagttgctttaccatcgataacgaggttaacgaaatcagcgtagaactcagatttgtgttcttggttgataacttcgttgtgatctaaatcgatagcgattggctcttcatttccgccataaacgatagctggaaaacggttagccacacgcaggcggcggctcgcacccttaccctgctctttacgtactgttgcattaatagttaacatcttttttctcttatgaaaaagaaaatacatacttgttacaggcgacccagcaacaagctcgagatttggtttatctaaaaacagataaagcggggcgcattttaacgaaaaagcactctaacagcaaatataaatcgactttaatataaggtatctgctttacgaaagcgtccatgatagtcaaataacttattacgaatttgccaaaagccgtcttttttatttttttgtgccacaataaaatcaggataacgtaataaatcaaactgattaataatatcttgagcgttatgccataccaaaggaacgccaggggcgcgctggtgttcgtgtaaaaacttgagttcaaatactttacgttgggcaggcgtttttaaacgaaatcgttctgaaacagaagtaccttcttcatcataatagttgattttaagccactcacctttttcatcttgaccactgagtaattgcattcctccacagcgaaggataagggcgccttttagctttaaagcggctttgagcatatcatcaggatcaactaggatttcattacagtgcacacaacgccgtgcggcgatatcattttcttcattacagtgtgggcataatttaaaacgaaagcgataatcacactgttttttttgtccttgctcatcaagctcccaaccttggcaacgtcgcccatagtgctcaataatatcgccatctgcatcaactatgccccagaaagtgttagcgaattgacagagaggacaaaacacttgtaccggtttgctatttggattgggctttttactacccacttcaggaagataaaggtcgtgagggttacctgcataatctaagattaaacattctgtttttcctgcaaataaccttaatcctcgtcctactatttgttgatataaactgacggactccgttggacgtaaaatagcaattaaatcaacatggggcgcatcaaagcctgtggttaatacagcaacattaaccatataacgtagctgttgctgtttaaactgtgaaattaatgcgtcacgctcagaagagggggtctcagcactgactaacgcggcttgtccttggggtaataatgtgaagatttctgtcgcatgttcgactgttgccgcaaatatcatcacaccacggcgttgttcaccgtattcaattatctgtgacacaatatggggtgtaatacgctgttgtttttttacttcgcgattgagatcttcttgattaaaaataccattttggctagttctaacttggctaaagtcatattgcaaaataggcatatctaaacgtgttggtgggactaagaaatggtgacttatcatgtagcgtaaaggtaattcataaatacagtcacgaaaaaagcaattgtcatctccttttaccataccgtgatagtgatattggtaaatccaaccagtcggtaaacgataaggagtagccgttaatcctaagatgcgtagttgggggttaatggtttgaagttgtttgatcacttgttggtattggctatcttcagacagactaatacggtgacattcatcaataattaatagagaaaaagcatgctcaaactgcgataagttacgtgctaccgattgtacactgccgaaaacaaccttgcctcgactctctttttgctgtaatccggcggcataaatatccgcagatagaccataggcttcatatttgctatggttctgctctactaattcctttacatgtgctagaaccaatacccgcccacgtgctcttttagcaagttcggcaatgactaagctttttccagcaccggtaggtaatacaataagtgctggtgttttatgttggcgaaaataagtgattgtcgcgttaaccgcgtcaagctgataaggtctaagtgtaaaagccataaccatacatcaaaagcaaaacagagcaccagcgtagcactttttagcgatgagtgcgaacagaaagactgtaattaaatacagtgaaaggctaaatgatttaagggtaaattaattagttgttttattgttaatattcatttttaatagatgcctcatatcagatggtactcttccatttttcagagaaattcatgcgattagataaatttttatcccagcaattggggattagccgtaatttagtagctcgtgaacttagagcggggctcgtgactatagatggtgaaatggtaaaaacaggtgcgactaaaatcacacctgaacaagaagttgcttatgatggcaatgtgttgacacaaattttaggcccgcgttattttatgttgaacaaacctattggttatgtgtgttcaacggatgatcctgttaaccccaccattctttattttattgatgagccactagcacataaattacatgctgcggggcgtttagatatagatactacagggttagtgttattaaccgataatggtcaatggtctcatcgtataacggcacctaaacatcactgtgaaaaaacgtatgtcgtaacgctggaacagcctattgctacggatgtcgctgagaaatttaaaacaggtgtccagttaaatggcgaaaaagaattgactaagcctgctacattggaagtaataacaccgactgaggtaaaactgaccatcagtgaagggaagtaccatcaagttaaacgtatgtttgctgcggtgggtaatcatgttgtcgcgttacatcgagagcgtatcggtgatatcacattagatgatgctttagcgccaggagaataccgaccgctaacagaagaagaaatcaatagcattcatctacctaaataataattatattttgtcgttttttggagtttaactgcgtgcaagagcaacgtccgtcgtactttagcctcattttaatattggggcttatttccatgcttatgccactggctatcgatatgtatctgccaagtttacctactatagcacgggattttggcgtgcctggtggccaagttcagatgacattaagtagctatatctttggttttgctattggacaaatggtctatgggccgatggcagatagtctagggcgtaaaccggttattctaggtggtgtgattgtttttgcattagcatcgagcgcttgtgcattatctgactcgatcgatatgctaattggtatgcgttttctacatggatttgctgccgccgctgcaagtgttgtcattaatgctttaatgcgggatatgttttcaagagatgagttctcaagaagtatgtcatttgttgcattagtcatgacgattgccccattattagcgccattacttggtgcttgggtgatgaactggttctcatggcatgctattttttggagtatcgctattgcggcgatcattgctgctgcattaattgcgctctatataccggaaactttgcccaaacagcaccgccaacgctttagtctacgagtgacatttagtcaatttattagcttatttagagcacgtcgagtactttgctatattctggcatcgggattttcttttgcagggatgttttcatttttaagtgcagggccttttgtttatatcgaactacatggtattccattcgaccaatttggcttgtactttggttttaatattattttcttgattgtcatgaccagtatcaatgggcgctatgtgcgccgatttggtgcactgaatatgttacgttttgggttaactgtgcagtttttaatgggcatattcttaatattggtggttgcccttaatttacatttttacttccttgttgtgggagtggctatgtatgttggtgggatagccatgataacctcaaatgcgatggccgttattcttgaagattatccacatatggcgggtacggtatcttctttagccggtactatccgttttggtgtgggggctttagttggaaccgctattgcaatgttacccgctaaaactgagtggccgatggtgagttcgatggcattttgtgttatttgtgccatgagtttcttgttacttgctcgtcgttataaataagaatatcacgctataaatacactatatttatagcgttttcctttctatttatctttaaaatgtcattatcaccatgtttttcactaaatatttctctaaattctctcccttcaatgtaacttatttgatttgcatcaacacttaatgttgtgtttttgttaaattaactagggtttattttaataatcatctattattgttttagtaatatgaaatatcatgataaaaattgatagattgttttacttaaatgcgtaaaattttatgcaattattttatatagttgataaaatgttaaataaatgaaagaataattgaaaagggtaatcagggctgatatgaaggttgataaaggttaagcgaaataaacagcttaaaatacctctctttttgtaagattattgtaacgttcatgctttatttttaacaatattttaatatgtgtgtgagcaagtcagttcaaactcgtattgatgatgtattaaattaacgtgttgatgaaacaggattgatttgtggaaaatgtacaactttcggtggttcataagctgccgctgagttatcggtggctagcaggctttacaggaacaagggtagaaattctacctgagaatgatgctagtagacaaaataccttgattggcttaaaactgttaagtcatgatggtatgactttagatgaggcaatacagaacttacaaaagtatctgaataatctcaatattgaaaatgtgattattgagtgggatggcgtaccttgtttatttttacatagtgatgatgagtgcgcagcactttgttgcttaaaaaatgctggggttgcaattgctgagccatttccaacagactactcttatctgtagttcttttttgttcttaatgggtatttctctacgacatatgcacaatctatagctatgtacttagataaaaatactcactaacgatggctatatggctctgttatgcaagaaaaaacaacataaaaaagccccatactcaataagtattggggcttttttattgcgataagatataagggaaaattttatcttaatgacgcttgagaatagttatcagcaagacttgttgttgtattattatcaatgatccgacgtgctgtatagaaacggtttttccaatagacattggacatttcagaaacgataacaccactactggttgacgcgtgaacaaacttatcattaccgatataaataccaatatgacgcatagtgcgaccagtcttaaacagtactaagtcacccgcttttaaggttgaacgattaactttggtaccggcaaattgctgatcggaggttgaacgaggtaattcgacaccaaattgatcacgaaaagttctttggacaaaagcggaacaatcaataccactttttgtattgccacctaagcggtatgcaacacctttccagtctgcatattggtcaagtatcttagattttatatcgagattcttcaccaatgattcaaattcatcttgagatgcttgggaaatagatgtgcttgaagatttattaagtggggcagttgttgaattagctaagcgtgaagacgcgttttgtgaactacaggctgataacgtagctacgacaataaacgccggtatgagcttaagcattctcataaacggtttatttctcattgtgacagatttcccttacatccttatgtgccagatgagcacatgaatattcaccaaataaccagagaatatagtgtaatttaactctggcaaccctatttcgcgaaaaacgtgctctaaagcacgtaaatatccacattaaacaataaataatgtggaaacgtaaaaagtttacataaagaaaagtcaaatggcgagaggaaagaggcttaatttacaaaacattagataataaagaacacatactaaaaatgattatctttttgttataaaactatcctttacagataaaaaaataagcgctcagtagggcgcttatttttacttttacttattttttatacttaattagctaaatgcttttttgcctttaaaagggagatgttcatctagccaatgaatgatgatatcggatgcaggggttattaataaccagcttgttgtgactaaagtgagcgagatagagccaactaagatatcagaagcccaatgtgcgccagccataacacgaggtaatgaaaaaattaccgtaattaaaagagcgcataaaaaagagcgaaatgaaagataacgtaatataaagctacaaaagatcagtagcatcaaaccatgatcgccaggaaagctatcacctgatgcatctttagtcggtattcctgtcactacacctacgcggtgtacatcgtgaaaatgaagtgttgggctaggtctttcgataggaatattttgtccaatctgattaattacgattgcacttagcaccataactatacccacaataatgagatggcgtttgccctgataatctttctgacgaaaagtatggtaatacaaccctcccatcgccagcagaataatcacatcgaatgctcgattattgacataagccacaaacatagcaaaagaagagtctggcaatagttgccgattaaaaaaataaaagatatgtgtatctattgaaagccaaaagccatgttgtgcgggaagataccaagataaaaaaagagtcaatccaaccaaatttaacagcaagataagagacaatttttgtttagcagtagaaagtttcataaggataattaaaaaattcgttgattaattgtgatctaaatcacaaatattccaagtttatggcagggactatagccaaaataaaaaaaaatatctttgcaattaattgctaaggcaaatgttatctttttgtttcaggcttgttagcttctcttatcttgatataagtcaaatatagaatattttttattgatagtcttaatttgagtattttataatttctttctaaactttaatcaaagataaaagttaaataaataaagttactagccgatattagttattagtttaatagcatattggctcgtggacattctgtacttaaataaatgagaggaggtttattttgaaaaagataccgatagttttagcatgtctaggtctattattaacggcacctagtttagcacgtgaaagtaaagtgttaggttcaacaacaattacttttgttggtgctattgtcgaaggcggatgttatgcatcatcagaagaaaatactgttaaaacaagttgttggaatggtaaggagatgaaagacttccaatataaactagatgctaatcagcaatttaactcgcaattaattaataataaaggttttatggatatcgaatggattaacgatcatttagcagtaatgaatattgtttataattagttaattaatactaataataaaataaagtgtgttaattaaatagaaagttgatgtttaaataattaggttattaaagttatgaatatttgacttaagcttaaatcaacgttgattttttatttataaataaaaaccactcatatttgatagacatcaaacattcttattgtgtctatatgaatgtcatattttattgctatgataaaagtatgtcgagtaggcgtgatcctcatacctactgcgcaaacaagaagtgaggtcgttatgaaaaaatatctgaccattttatgcagtcttctcgtttccagttcgatatcatttgcttgggcgtcaacagcacagcaaaccacaggacagatttatgtacgaggagcgattgttgatccagcttgtgaaattaatttcacactcgatcaagctgagtaccaatgttacaaaaataacaaagtctttacatcaacccagtctattttccctacctcttttgaacaatcatcatcaattatactgcctcaaaatatggggaaagctgaaatccgttggatggatggcgctgaaaaaaatggattgattaatgtgcaatatttttaattgtgtattgacagggaatgattaggtaaacaagtcaaataatcgttgtcacagtgggtttcttacgattatctgacctatttagcatcacatcagtaaaatattactttgtgagggaggtttttggcggttaattaatcagcacgccccatatagcgacgttcagcaatatgaatacggattttatcccctgtagaaagatattcagggacttgaatgactaatccagtaggtaaagtcgcaggcttagtacgagcgctcgctgacgcgcctttaatgcccggtactgtttcgataatttccatatcaacagtttgcggtaactctaaagctaaaacttgtccatccatagttaaaacctgcatcccagctaagccttcttctggaataaacagcagctcttcttcaatctgatcttttttgaaggtgtaaggtgtataatcttcattgtccataaagacatattcatcaccatcgatatacgagaaactgactgcacggcgtgttaagttgatagtatcgaggatatcatcccctttaaaacgttcttctactttttggcctgtacgaatatcagtaaagcgcattttatacaaagtacttgcaccgcgagcacttggcgcttggatgtcgatatcttttaccaataataatttattgttataactgatagccataccgcgcttaatttcattagcttttgccataggtaaccttctataaatagcattgacgataatggcgacaaaattactcgtagtactgaaacttggcaagtatttcgcaatatttttttggcagaagaaggttcaagccagcatattgctggcttgacggaagatcagcggtaaataggtaggagattaaagtttgctaatatgtgtgcaatcgcattaattgcaccaaataagatcacaaagataatcataaaggtgccaccaggtgctttaaagctttgttgctgatgacgttggcgactggcttttgccattaatgctggaataatcgccgcccaaatagtggctgcaagtcctgcaaagccaatagcatacaagaagccatcaggaaaaataatcgctagaatggtaggtggtacaaaagttacgatggctgattttaaacgtcctgtcccagtatttgagaatttaaagaaatcagctaaataatcaaataaccctaaagacacgcctaaaaatgaactcgctaatgccatatatgagaacaagtctaataagaatgaaacggaagtatttgctgtattgatacgcatttgtgccagtaagttaccaatatttccgccttcagcaatgacttgtttaaagccttcacgaggaatattaccttgtacaacaaactgccataaaatgtagatagccagcgaaatcaaggtaccaattaatagacttttcatcacggctttaccgtctttacggtagtaggtgactaatccaggaatattgccgtgataaccaaaggaggttaataaataaggtaatgcggctagtgcataaggtaaataactggcatggctttctgttgtattaaataatactggcattttcacttcggtaaataatccaccgatagcaaatacaaaagccacaatcataccgccaattaatatggtacttaagcgatcaacggctcgggttgataaccaaacgaagaaagcaacaacaagggcaaatactaagcctgcaacggcttgtggcaagctaaccacattagcaaaattttgcacaatgatggagctacctgcagaaatataggcataagttaaaatatagagaacaaaagcaatagaaagaccattaatggtactccatcccttacctaataaatctttggtaatagtatgaaagcttgatcctagggggtagtgaagattaacttctaagatcattaagccagacataaataggcaaaaccaagtataaatgagtaaaaagatagagccggtaaaccacacaccggaagtcacaatagggatggagaacataccggcgcctaccgccgtaccggcaataatcatcgcaccaccgagtatagatgggcgtttagcaatggatgtgacttctgacataacatgtccttataaaaaatgactcaatgtactagcttgatagtgtagagaatacacgcttgatctgagggtgtaaatagagcacttccttgtttattaaataaaaaatgaataaaaatagtacaataagtttttatctttatataaatcaatgggttaaatcatttgcactcaaaaataagccaaatataataaaggacattaaacagaaaaaagatcacgttgaataataactaagtaggggaaaaacattattctgaataaagaatattcagaataatgatgaagagtgttaattaaggttgatagaaacgtttacttttccataaagcaatagaattacggctcgcttcaaaatggggttcaggtaaatcatcaggtgagcaccagcgtagttcagaacatttatctggctccattaacttaggctcgccaccttgatattgcgctagcatacagatagatacggtatgtttaccttctaattgataagtttgtagattgttgctgatcccaatcacttcaggagtagggatggtaatgccaatctcttcttcaatttcacgaatagcacattgctcaaaggtttcccccggatcaacatggccaccaaaaattgaccaataaggagcgtgtttaccacagcgtttacctaataatacttcacctttttcattgacgatgatcactccaacaccaacgactacagacatgagagactccaaaatagcatacggataaaaaaatagaggcttgcgattttagtacatcaaatcgcaagtaaaaaagaaataaggttattgagtttgttgtgattttaaccaagctatttcttctggccaaatatcaggattaattgtttctaagataagtgggatcccatcaaaacggatatcttgcataatataagtaaagggtactttgccaatattgccttggcctaaactatgatggcgatcgacacgactagccaattcgcttttagcatcatttaagtgcatggcttttaaatattgaaagccgacaatattatcaaattcagcaaaggtcttttcacagtcttcaacggtacgtagatcataacctgcagcaaaagtgtgacaagtatcaatacaaacgcccactcgagatttatcttctacaccatcgataatagcggcgagatgttcaaaacgatagcctaagttagtgccttgtccagcggtattttcaatcactgcggtcacattttgggttttatctaaggtgatattaattgattcagcgatgcgttgcagacatttatcaacatcgattttttttaaatggctacctgggtgaaaattaagtaattcaatgcctaattgctcacagcgttgcatctcatcgagaaaagcggctcttgatttttcaagggcttcttcttctggatgccctaaattaatcagatagctgtcgtgtggtaaaatttgtgctggaccatagccatagatttcacaattttttttaaatttatcaatcgattcagttgataacggggctgctttccattggcgctgatttttagtaaaaagagcaaatgccgttgctttgatctcatgagctcgtaatacagcctgatcaacaccacctgcagcactgacatgtgcgccaacaaatttcatcatagttctcctctaatctcatttcacactacgataacaaatcgtgggcttattgacatctgaatatgaggaaatataaaaaagcgcaacttaaactagaataagttgcgcaatacggaggtacatactcaaggatagattaaacaatcaaatcaacacagattggataaagatattaatagcagcaccacctaacgttagccagaaaaagagaaataaagctagcagtagtggttttacacccgcttgacgtatcgcactaatatgcgttgttaaacctaatgccaccatcgccattgccaataaaatagtatcaatagtgacgatatggttcacaatagcggcaggaattaaattaaatgaattaaaaccagccattaagataaagaacacagcaaaccaaggaatagttatcggacttttttctgttgtcgcacctactgttttacggccctttttactaatataagtagaaaggataattaagaaaggtgccagcatcatcacgcggatcattttactaattacggccgcattttctgcatctggactaattgaatgacccaccgcaacaacttgagcgacttcatgtatggttgaaccagcgaagataccaaaagtttcttcactaaaaggtaaccaacccgcaaaagcgttaagatggaaaaaccatgggtagaggaaaataccgatagttccaaaaattacgacagtggatacagccaccgcaacttggctcgcctgagctttgacaacaggctctgttgccatgaccgcagccgcaccacaaatactactacccgcaccaattaacatgacggtttgatcatcaagaccaaaatattttttccccacccacattgcaatgagaaaagttgaggtcaacataatagcgtcaataattaatcctgttgcgcctacatctgcaatttgctgaaaagtgagtctaaatccgtataggatgatccccgcacgtagtaaatagtgtttagcaaacttaacgccttcatcactataaggtttagcgatgggataaaccgtattacccgcaataatgccaaataagatagccagtgtaagagcacctaaccccatactggaaaaccatggaatatcacctacgtaaatagcgagggcggttaatatacctgttagcagcaagccggggagccagcgataaacaggaataaaacattttttagccaatgtggttgtttgactttgctctgacatagaaaaaccttgctcatgtaaattttgcataagcatataacagatactattatttattaaattcattatttttataataataaccactaaaactaatataggtatattttcacaattgttcttggtatgttattggtttgtggatagtatgttattactatgacagctaaaaggtgggatggacatgcgtattacattgcgacaactggaagtatttactgaagtacttaaaagtggttctacaacacaggcttcacaacagttggcattatctcaatccgctgtgagtgcttctttaactgatctagaaaatcagttaggagtacaacttttcgatagagtggggaagcgcttagtgactaatgaacacgggcgattattatatccaagggcactctctttacttgagcgtgctactgaagtagagcagttatttcaagccggaaatggtgctttacgtattgctgcaagcaccactattggtaattatattttgccacaaatgttgggtaattttcatcgtaactaccccgatattccacttgaaatgagtattggcaatacggaagaagtcgtcaaatcagtcagtgagttccgtgttgatttaggccttattgaaggggcttgccaaagctctgaattgatcagccaaaaatggctactggatgaaatggtcatattttgttcccctgaacatcctttagctaaggcgaaaacagtgacattagccgatcttcaatccgcgccgtggatcctacgtgaaaacggttctgggacgcgagatgtactcaatcatctgctgtttgcttcattacccggatatcgaatcgaaatggaattaggtaattcagaagcgataaaacatgctgtaatgtatgaaatggggattagttgtttatctcgccgagtgatccaagatcaaatagagagtggctctttaaaagagataaaggtcgaaggtctaaaattacaacgtactttatatttggtctatcatcgccaaaaacatgtctctgatgccctcaaaaaattactttcatattgtaatgctgaacatttaatcgacaacgcttgataagttactaataattgaagcccgattatgaaggtatcttataatcctagatccttgctattcaccacagccagatttgttacaattgatgctaggaatatgaatataaccgtggaatgataatgtcagaacaacaaacagataccgcaaaatcgggtgcggtacgcactttgcgtcgagaattaaaggcgcgacatttagcgatgatcgctattggtggttcaattggtacagggctttttgtcgcatcaggtgcaactgttgctcaagcagggccagggggcgcattgctctcttacgcattaataggacttatggtctatttccttatgaccagccttggagagttagcggcatttatgcctgtttccggatctttttcaacctatggctctaaatatgttgatgaaggatttggtttcgcactaggctggaactactggtacaactgggctgtgacgattgcagttgacttagtcgccgcgcagctcgtgatgctgtattggttccctgatgtggatggttggatttggagtgcgttatttttagccgttattttcttgcttaactatatttctgtaaagggatttggtgaagctgaatattggttttcattaattaaagtatcgaccgtgattatttttattgcggtgggtattgcgatgatcaccggtattatgaaaggtgctgaaaatgcaggttggcacaactgggaaatcggcgatgcgccttttgctggtggttttgccgctatgataggggtagcgatgattgttgggttctctttccaaggaactgaacttatcggtatcgcagcgggggagtcgaaagatcctgcgaaaaatattcctaaagcagtacgtaaagttttttggcgtattttactgttttatatcctagctatcttaattatcagtttaatcattccttataccgatcctaacttgctacgtaatgatgtgggtgacatcagtgtgagtccgtttacactggtatttaaaaatgcagggttactttcagctgccgctatcatgaacgcagttattttaacggcggtgctttcggcagggaactccggtatgtatgcatctacgcgtatgttatttaccttagcaagagaaggtaaagcgccgaaattttttggtaaattatccaaaaacggtgttccacgtaatgcactttatgcaacaacagtggttgcgggtttatgctttttaagctcaatgtatggtaaccaaacggtttatttatggttattaaatacatcaggtatgacaggatttattgcttggttaggtattgcaatcagtcattaccgttttcgtcggggttatgtagcacaaggtcgtgatctgaatgaattgccatatcgttcaggcttcttccctgtaggacctatttttgcctttattctctgtttaattattacattaggtcaaaactatcaggcatttttagaagatactattgactggtatggtgttgtggcaacctatattgggatcccattattcctgctgatttggtttacctataaaatagtgaagaaaacacgttttattcgctacagtgaaatgcagtttcctgagcatattgaaaacaaaaaatagttagttttatcactaaatagagagccggctaatttgtgaactttatcacaatttagccggctctttttctattctatgactaataattacacaaataagagaaaattctaatttatattcgcaatcgcattgataagtattcttatttgctttattgttagcaaacaatttattgcataataatgtgacgacagtgttattggttatagaaaatagatctgatgtatgtaaagcgtcatcatccactctctagagcgatttttagctcatctaataacgcatcgttgtataagaagtcatatattgaatatcgcgtattatatcaattaagcgaattttcctcttatttgtcacattattctcaattaatcaattttaatgcaaaaaagtgatgaataaattatcaggttaaactttggcatatttatctgttaatgaaacagctggatagaaaatcaatagcaatatgcaaatagatgtaggtatatatttgtttgattaatctacagacaagcctgataaatatattgtcactattaataggattttattaacacattgttttaaaagaaaatttatatgtcaaattacttgaatgataaaaatattatagaagcataaaacaataacagcagaagtataggaatttagtcaatagggatataaaaataatatcaaaataactaagggtaattaaattaattaccttcattgttgagcaactgtcgatctgtccatctatataaaacttaaagaatatatattcttggagaatcgggaatggtagtgttaaagaaaaataaaattgcgcttggcgttgttgctgctcttgcatcaagttttgtgatgacagcttccgcagaagatcctgaaaggttactggtgacaaccgcttcgggatttaaacagactgttgaagatgctccagcttctgtttcagttgtaactcgtgaacaattagaaacaaaatcatatcgtgatgtgactgatgcgctaaaagatgttccgggggtgctagtgacggggggcggtagcagctctgatattagtattcgtggtatggatcctaagtataccatgatcttagtcgatggtaagcgtgttgcatctcgtgaaacgcgtcctaatagtgataactcaggtattgaacaaggttggttacctcctttacccgcgattgagcgtattgaggtagtaagaggcccaatgtcttctttatatggctctgatgccatgggaggcgttatcaatattattacgcgtaaagcgcaaaaagaatggaactttagtttacgtggtgacacaacgttgactgagcgtaaaaatgaaggaaatacaggacaaggtagtttctatgctgcaggtccattgattgataatgtgttaggtctaaagctgcaagggcaatattctcaccgtggtgaagatagacgtgttgatggctataaccgtcagatcacggcaagtggtggcggtacattaagctggacaccagatgagaaaaataccgttgaatttgaatttaaaaaagataatcaacatcgtgattcacgtgttggctattcaaaatcagctgaacttgttaaaggaaaggcaccacaaagtagctttactgattatgagctaacgcattatgctttaacccatgatggtatttatgattttggtactatgaatacctatgttcagcgcgatgaaagccgcaatccatcacgtaaaatggattatgatgatacaactgttcgtaaccaaaccgtctttatgtttggtgatcatatgttaagtgtcggcggtcaatatcgctatgaagagctgaaagatgaaggcaataagcttaaaggtaataataagctagatcgctatagttgggcgctgtttgctgaagatgagtggacattgacaaacgacttcgctttaaccgccggtttacggatggataaagatgaaaactttggtactcactggacaccgcgagtttatggtgtttggcatttagctgatgaatggacattaaaaggtggggtatctactggatatcgttcaccggatttacgtcaagcgacagccacttggggacaagctacaggcggtggtcgttatgatgcggttatttacggtaatcctgatttaaaaccagaaaaatcggtgacagaagaaattggtattatttgggataatcgagataatttaaatgcaagtattacgatttataatactgattttaaagataaaataatggaaaggcgcgtttgtgacaaagactcatctaaaccatgtaaagcgagtgatggatttggacatgtttatgattttgtgagtactcgtgaaaatgttgataaagccaatatgcgcggtgttgaagttactgctaactggattatttccccagaatggaatttagcagcaaactacacgttcacagatacggaacaaaagagtggcgatttcaaaggtaagcctctgaataagcaaccgcgccatatggcaaacgcgaccttaaattgggaaaccacacctgaaatggaaacttgggcacgcattaatttccgtggtaagacatcagactatttatcacgtacttcaatggctaagagcacaccttcatacgcctttgttgatgtaggtactagctatagtctaacgaagcaactaaatctgatcggtggcgtctataatgtttttgatcgtcgcatcgaaagagataattacggttcaaccttagaaggccgtcgttataacatcggattaaactacaacttctagttttatccctcagtgtgtgtcaatcaagctccacattatgtggagctttttttgttatttaattaaagccaatactggcaaaatgcataataggcatttatatttagtttaatgaatcacctaaaaataaggttcatttgttttaaccactgactatctttactgaatacttaatctttttttcttattactgaaaatcatttttgattactctatatggcttgttgaaaaataatggtatttcagttggctgtatcttttttagtctttatagcgtgaaataagcaattaatttacattagatttatttatgcattattaatactttattttggttggtattgttgtatataacatgcagaattaattaactttttgattgttaatgtgttaatgatttttgttgtttaataccaaacgacaataggctatatctcaaagttaggctttgtgataaaaacgcaaatattgtcaatgaaatgtgacagtaaaggctaacttagtttgctatttaaaaagatcgtaaaaaaaggtggttttttgatgaaaatctattgctatttaagtctgagacgtgcaaaatgcgcccactaaaaatatgactgatgcgttttaactgcatcggtttttttttgctttttacttattactacaccaagaggtcagacttattttagtctgaatagataacataatttgattagcagccagccccttagagaaagggttgtcgtgatagaggaatgctaatatggtacaattattccctttcgcagtcgggcctaacggcacctgcggtaatgatgactacggagcacggcgtctcctaaactcactcctgtcctcaaaaacttctttctattctgtttatagacagatgcgaagtcttcccagtaactgtcggttgagtttatcaagtactcagttcgaagttatgggagggttcgctcatgtcagataatgtcatctcctctatcggcaccaatcaaactggtgttaataaccgtgttcaattacgcaaaacattgacgctaatgcaagtcgtcatgatggggttggcatttttacaacctatgacgatttttgatactttcggtattgtatcaggtataaccaatggtcatgtggcaacatcatatgctattgcgttaaccgctattttatttaccgcagtgagctacgggaaattagtcaagcgtttcccttcagcaggctctgcttatacttatgcacaaaaatccatgagtccacatgttggttttatggttgggtggtcttcattattagactacttatttatgccaatgataaatatcttattggctaaaatttatttacaagccatattcccaggcgttgatccgtggatctttgttgttgcgttagtcgcgttaatgacattttttaatctacgcggaattaacgttgtggctaacttaaataccgttattgttgttattcaagtagctgtaatggtggtatttgttggtttattaattcatggcgtatataacggcgaaggtacaggggagttatggactttccgcccatttgcgtcagtagatgctgaattaatcccaatgataaccggcgcgacaattttgtgcttctcgttcttagggtttgatggcattagtaccttatctgaagaaacacccaatgccggtaatgtgataccaaaagcgattttcttaactgcgttaatcggtggtttaatttttatcgctgtttcttattttttacaattatatttcccagatatttcacgttttaaaaatccagaagagtcacaacctgagattatgctgtatgtagcaggagccttgttccagtctattatcttagtgttttcttgtgtgacggtattagcatcgggtatggcggctcacgcaggtgttgcgcgtctgctgtatgtgatgggacgtgatggtgtattccctgaaaaagcgtttggttatgttcatcccaaatggcgtacaccggcatttaacgtactgttagttggctttttagcgctaggggcgatcttttttgatttagtcactgctacagcgttaattaactttggtgcgttagtggcatttacctttgtcaatttatctgttatttcgcagttctacattcgtgagcgtcgtaataaagggttaatggatcatattaactatcttatattaccgattattggtgccgcgacaatgggggtactgtgggtaaaccttgaaccaggctctatggaattaggactgatttggggggcaattggtatactttatatggtgtggatcactcgtcgattccgtcgacctatgcctcaaatgccagagaaataacattgtatttagtatgttgattatttaaaaatggcctcattagtgaggccattttttgtttatagttagaacgcgatagagagtttcatatcaataccattatcgtgctgatttcttgccgttagtccgctgtatccaattgagacttttgatgtctcattaatttggatagtcgttccagcttttaccaccagtgcatctcgagcagcatcaacactatttgctataaatgtaggctgggtttgtgtgaaacgtaaatggatccctcgttctacatcgttatattggtgtctccagcctagctcaccatagagagaaccccttgatttactgttaaatttccattggttatttaaacgtagccctgtagtggaggtggttgactctagagtttgcgaatgggcttgtaaggctgctcgtccaccttgctcgttaatggtggcgttttttgttttggcatattcaaaattaacaaaaggctctaattgtgtatcagagagggtgatgggataagctgcttcaataaaaatttggctagtgttcccattgtaattcgccttatttttatctgactgtacaccatagttgaccgattttgttgtatggatacgatgaaaggtattagatgcaccagcacgtaacacgattgtgtcaaaatcatagccaccatagagtgataagtggtaattttcgctatttgcgtgactgttatcaccagatagtgaggttttggtgacccctgttgcaataccaagcagcattttatcgtgactaacccgctgatctgcacctaatagtacgccataggtggaagcatcatagctatttgcattgccatcattggaagtcttttcccaattagagagaattttagcccaaacatgacctttgttacctgcactttctttctctctattaattatttctgcatttttaatctgagagaggagtgtttcttttatttgccggctattgttgagttggttagataagatatccgcatgaatttgacctgttaattgattataggcagagcgggcatcattccctgtatccattcttataatgctttcataaataggatgtcccaagggtaatgcgtctatcgcattggcgattgatagttggttttttgttttagccacacttgaaaaggcggtgttatttcttccgacatttagtattactgaatttttatcgtaggacagtgtggtacctaaaaaaagatagtttggatttacatcagtaaattgaccattaacaccgtgatctgccgttaaaatggtatattttgtgttatataaactttgaacatcatcttttgttagcagattttggctattttcaagcgatacattaaccattccaccattcagtgtcgcggtacccaaactgattattttatcgctatcaccttgtgaatttatttcaacatggtagttgctaccagaattaaaaataacagtatcatctatattaattgtacctattgaatgacccggtgatacgatgcctcctgaataaacggccagcttattaatttttcctttaccagaaagtatccctttgttattgatattgacttgagaatcaacgctcccaccatttaatagcaatgctcctttgttgacatctagtaaagtgtttagtgttccttcaagaagcaatgtaccaccattaatggaagaattttttgcatagtggttttcaccagtgagcagtaaatgaccctgattaacttcaatgccagcaaaatggttattgcctgataagatcaaggtgccattaccttgtttgattaatttgccaggcccactaatatcatttttccattcatcaagttgaccaaattcagcaaagtcaaattcattagttatttgattaacaataaaatgattgtagaaataactagggccattataggctttcgggagattaattaatccccaattggcgtttggatcatctttgtttgcagcccagccagccaatgaattactcgggtaggtggtactcgctaagatagattgtcgttgctctctggttaaataggcaaagcgtaaacgcagtaaagcgttggcagatgttggtatttcattaggggtaatgcgtggtgcaggttctggatctttggttgcgtaataacctgtttcatcgttagtgattgttgtcgaggtcgttaagcaatgtggatttttgcattggctagcaacattttggcggacttctttggcaagctctacaaaagtgcgggtggtgtcatcatctgcaagcatttgtgacagcaggtaataattgcctattctggatgcaatggtatctgttgcgaagtgtgccccgacaataactcgactttcaccatattctattgctctggcaaacatttcactgcccttttcagggaataagatggataacactgcagcttgtttgtatccgttccacgtatgaccactgggataagatgagcctgttatagtggtgtagttatcaagataatgaccttctttatcaagtacttgataaggtcggccacgtaaaaaaagttcttttaagataaaatctatcgagcgtactctttttttgtttgtatcataagcataggtgcctgtgctatgtaatttattgagatcttgataagcttgaatatcgctaaagttgatcgatctagccttatcaccaaataaaatattagcataggtattaaacacataagtatgagactgtgacttatctgcttcggcaagttctctacgttcgccggtaatggcttgataattattgctgattattctatctaattcggcggttctcgatcctttttgagggctagttgtgataacaccatttttgatctcatctaaccaataattacgttggtcgataattcgttgtttggtttgtgaaatattggtttcagaccatgttgaatgggaaaaaagtaaaaaaaagcagcttaacgaggtaggtattacgatatttttcataaaataagccataatctctaaaaaattgagagctaatttatattagcaatgtttaatttttatgacaggcattattatattagagatattttctaaattgttttgcagtaatttattcagcgttttttttattatttttactaacattatatgatagtttgaatatagtgtgatcaatgtagtaaaaaatatcggtatattctctatattaaaaataaaaattagagtatgccgatgatttaaattataccttatttattaagcaaattagctaagctttatctattttgtactgttaaatgcttaattagttattctacttattcattttagaatgaatataatgaactttttgattcttttaatttttgcgctaattcagaggcctcatatcgctctgtgactatctcaatataagatgcgctatttgttagtgcggctttatttaacgcattatctagtccacttgctgtagttactttttcactataccaatctgttgcaccaaaggcttgcggtaactgatgatagttccactgagctaaatcattataataagcttcggggtaatcacataataatctctctattaaataaccatcgttatttaatactagaataataggttttaaaccgaaacgaacaaattgactaatttcttgtactgttaattgatgagagccttcaccggtaattaaaataatgcgtttttctggtgccgctaatgcagcgcctaatgcagccggtgttgcccaaccaatagagccccatagtgtttggttatgaaattgtgcaccttcaggtaataaagcgaagcctaatcccatggatgaggttcctgtttctgcaataataatatcattaggcttaaagaatttttctaaacgaggatagagatattgtgctgtaattttatcattatcagatgcaaccgcttcacctaatcctttcgctgttattttatgataagttttatttggtagtcgttgggttaattcagaaagaatatctgtcatataaacgcaggagtagatcacagaatcaatttcaacatagtctggcatgatactgataaattgttctgatttcatattagcagtgaaactgcctgtattaaagtcagtcagtaatgtaccgatccctaatatatattcactactttcaacaaattctctgacctctggtgtcattaattgtccgtcatacataccaacatattgcgcgttagattcacttaatatgcttttatccataaacatagtggcataaggtaaacctgttttatcaataaaatgctggattttatctgttaaccctaaacgtgcagataaaaagcctggtaatacacagacattattgctgtgggtgagtttctcaatgattgctgatactgctttttctaatgttgctttatcacttgttggcttttgtggtgcggtaacagataacggcgctactacttggctattagcataatctgaaggtataccaatataaacaggacgacgctcttttaatgccacatctattacgcgctccatttcttccacacaattttcgggtgttaaaatagtatgagcgcaagcaaggcgctgagcaatctgataaaaaacatcaaaatcaccattacctaaagtatgatgcacaaggcgtttacttttttgtacgccacttgctggcatgccaactaaatggaaaatcggtaaattttcagcataggcaccggcaatagcgttaatcgcacttaattcacctacgccaaaggtagtggataatgctgccatacctttaattcgggcatagccatctgcagcatatgccgcatttaattcattacagttaccaatccaacgttgttgttggttgttgcaaacagtgtcttcaatagggaaggcgtaatcaccagcaacaccaaaaatatctttgatacctaaatcatataatcggtctaaaacgtacttaataactgtgtttgtcatataatctccagaaaatctgaaataataatctactaaatgatagtaaagttcttacattatgcttaatgttctatcgctaattttgtttttaaggaaatggtttattattattgggggtataaccaaaagtaataaggtaaaaattatttatggatattcgtgttttacgctattttattgaagttgttcaattaaatggatttagccgagccgctgatgctttatttattacacaaccagccattagtcgtagcattaaaaaattagaggatgaattaggcactgttttattaataagagaagtggatggggtaaaattaactgatgacggtgctattttatatgagcatgcaaagcagatcctcgctcaatttaatagtatgaataaagcattaaatgataaagatgaacctttaacaggcgccttaaatgtcggattacctcctgttatagcctcaacctattttgctgatattatcatggcgtttagctctcgccatcccaatgttgaacttaaaatttttgagctgggcaccaaacagatggaagatgcgatgttagaaggcacggtagaaactgcggcagtgatgttaccttttaatgataaagattttgaattaaccattttttcagaagatcacttgatgttattagtagcacaatcccatcctttggctaaagataagaaggttaattttaaacagcttattacagagcggtttatctttttttcagaagattttcgtattaatgatttggtacgtagtgcttgtgggatttataacactgaaccacaaattgtggggagaagtaatcatttagatttaattattgcaatggttaaagccggtgtcgggatcacactgttgcctaatagcatgtgtaataaatatcctatcgatgatttagtggttattcccattacttcccctaggttatcttatcaattagctttagccaccaatcaaaatagttaccaaagccgtagttgccaagcatggaataaattagcaatagagaaattaatgaaagagaatatttaatcatggaatgataaatacgctttgtaaaaagcgttttattaatggtagctataattattttatcaaactagtggctaatttattgtgattaacttgctcacaatggtataaaagtggttatattgataatacatttctttttatctcattatttttaaataaaaattaaactgtgataaatagaaaaatcagacaagacaggaataggatagggacaatgaatgagagtagcagctccacaaaccagcattttattcgtaagttagaaggtattgtcggtaaaaaacatgtattaacccaagagcataaaacagagcgatatcgtaaagggtttcgttccggacagggaaaagcgctggcagtggtattccccggctctttattagaacagtggcgtatttttaaaacctgtgttgaagccgataaaattattattatgcaagcggcaaatactgggttaacagaaggttcaacccccagtggtgatgactatgatcgtgatattgttatcatcagtaccttgcgccaagataaaatacaagttctttctgaatataaccaagttattgcctttcctggcagtacattatggcacttagaaaaagtattaaagccattaggaagagagccacattcagtgatagggtcttcttgtattggtgcttcggtgattggaggcatttgtaataactcagggggggcattagtgcgccgcggtcctgcttatactgagttatctctttatgcccgtgttaatgaacaaggtgaagcagagcttatcaaccatttgggaattgatttaggtgacactccggaagagatattaaccaatctggataatcgacattatcatgcgaaacaaattcatgcgacggataaactggcatctgatcatgaatatagtgagcgagtacgtgatattgatgcagatacaccatctcgatttaataatgacgaaagacgtctctttgaagcggcgggaagcgccggtaagctctctgtttttgccgtgagattagatactttccctgctgatcatcgcacacaagttttctatattgggaccaatgatcctgatgagttagaagatatccgtcgccatattctcagtcaatttaaggtattacccgttgcgggtgagtatatgcatcgaagttactacaagatggcagaagtttatggcaaagatacttttttaattattgataagttaggtacagataagatgccagcattatttgctattaaagggcgtgttgatgctgttcttaataaagtgccatttttacctaagaatctaactgatagaacaatgcaattgatgagtaagttatggcctgctcatttacctgctcgtatgacagaatatcgcgataaatatgagcatcatttaatgctaagaatggcggatagtggtatagaagaagcctcaacttatttaaaagaatattttaaacatgccacgggggattatttcgaatgtacagaagaagaaggtaataaagcctttttacatcgttttgccgccgcgggtgctgcggtgcgttatcatgccgttcatattaacgatgtggaagatgtgctacctttggatattgcattgcgtcgtaatgatcgagattggtttgaaaaactgcctcctgaaatagaaaaccaattgctctataaattgtactgtggtcactttatgtgtcacgttatgcatcaagattatattattaaaaaaggtgttgacgctaaggcgcttaaagcacagatgttagccttactagacaaacgtggtgcggaatatccagcagagcataatgtagggcatctctattatgcaaaaccgcaattaaaagcgttttataaacataacgatccgacaaatagcatgaacccaggcattggtaaaacctcaaaattaaaatattggggagaagagtgtggttgcgggcataatcataatcaagctgaagttaatcatatagaaaacaaagaataagttttttattctctgacagctaaatataataaaggcagggaaacctgccttttgcgtaatttaattgcttatctgatgttattaactcgcaatttcttgagcatataaatatagctcttgcagttgttttagcttttcttcgttatcgctatgttcttctgctaacagctgaatggtattgatatattcagtcagcttttctggcgttaattgctcttttctatgcgctaaccaacgttgttgttcatcataagttaatgtggctgggaagtttctcgcacggtaacggaaaaacagcggctccatacgtggatcttcaaaagttaaattaagtgctggtaagttttgtggctgtgttgagcgaataatttccatcgcgctacgatcattatcgctaaaaaagccattgtataattgagcatcaacatcatctgcaggggtaaatggtgtttgctgagcaaaaatctcgacgactttattgcggatctcaggattagacagcaatattgcttggttatttaaacaattatcaatatctaatccaattctatcggcatcttgagatctgagggtatttttaggtgcaacgatagggcatttattaatatgcagtaattttatcggaactggtggctcatcggcagataactcactgcgaggagtatataagcgctcacgcaattgctctgaagtgagggttaataaaggggaaatatccgcagctaaatcacaaacaatcaccgcattacgattatctggatgccaagctaaaggagctacaaggcttaaattagaacgcgctgcaccaaacataccagaaacatgcacaagcggcgtcatggttgggatatctatcagtgcttgtactttacgtttatcacgtaaattaaagaaataatcaaacatacgaggttgcgcttgtttgagtttttttgccatcgcaatagttgcataaacgtctgacatggcatcatgcgcattttcgtgggagatcccatttgctttagttaatagctcaaggcgaaaactcggaaagccatcatcattctcaggccaattaattccctcaggacgcaatgcataacatgcacgtaaaacatcaagtaaatcccaacgtgaatttcctttttgccaactataggcatagggatcataaaaattacggtataagatatttctggtgacttcatcatcaaagcgtaaattgttataacccataatacaactgttaggctggctaaaggcttgatgaatttggcgagtaaattcagcttctgatacaccatgctttagtgctatttgtggtgtgatccccgttatcatgacggcttctggctgaggtaagtaatcatcattcggtttgcaataaatgaccagaggatcttcaatgatattaaaatccatatctgttctgacaccggcaaattgcgcagggcgatccatcgcaggatgcgtaccaaaggtctcgtagtcatggatatagaaagtgggggtattagctgaatttgacaaggtttcctaccgtaatttatctgcttaattaattgatttttaaatgagttttaaagcattaaaccttgcactattgagttgcatcgggtttaaacaatggatataacgacaaagtttgattgatgatagtgtcacaaatatcaaattgttaacaatgcttaactgcgataaaaggtatggtaaaccatattgactaaaacgtgaaatatctaatgaataagaaataaaaggagcatagcgttgagtatagggagaacctcgtttaatggggatatacaaatagcgatctatcgcacataacttatatgttaacgttaactttagtgcgttaaatcacataatggtaaatattttctacgttataaatagagttaacgttaacattctggtcgcaaaatgactttataaggcgcttaacaatgaataaagatgctaaaaaatactatgtgatcttaagtgcgttgctatttttcttcttttttacatggtcttcatcgttttcattaatctctatttggttacatcaatatgttggacttaaagcaacagatactggtttgatattctcggctatatcattgattgctttatgtgcccagccactctatggctttattcaagataaactgggtttacgcaaaaatttactgctggttatcgcggtattgcttattttatcggggcctttttttcttagctttgcggcaatattgcgctggaatatttttattggctctattctcggagggctctatgtaggaatgacttttaatgccgggatcggcgttttagaatcttatactgagcgtgttagccgtattcgtggttttgagtatggcagggcgaggatgtggggctctttgggatgggcatcggcaacttttattgctgggcataatatcaatatcgatcctaactataacttttttatggcatcgatagcgggggtgatcttcttaattctgttggcgttactaaaaacagataaaccagatgcttttaatcaattagagcatggtaaaccttctgcactcaccatcaatgatgcattaaacttactgtcattaccgcgcttttgggcattaatattatttgtggtcggaacctgtatttatagcgtctacgatcaacagttcccggttttcttctcttcacaatttgcatcattacagcaaggtaatgagatgtacgggtatcttaattccttacaggttttcttagaagcgggaggaatgtttgttgcgcctttcttagtgaacaaaataggggcgaaaaacggtttattattggcgagtagtgtgatggctgcgcgtattattggttctggattagttgaagggccgataatgatctcttgtatgaagttattacatgccgttgagcttcctatcctgttaatttctatttttaaatataacagccaacattttgataagcgtttatcttctacattgtatttagtcggtttccaatgtgtcagttccattgtggcaacattgttatccccattagcgggttatggctatgatcattacggttttgcccctacgtatatggtgatgggatgtatggtagtcggtactacgttactttctgctgtgttgttacgtgctgactcgaaagcattaccacaacatgatatgactgatctcgatagtaacaataaagctcaaccgatttaagcgggtaggcattagctattacagcgctgctagataatttttatggctaccattcgtgagtggtagctttttttatcgattttatttaggtttacgaatatcggctgattgactatattgaatagagcgtatcattctaatctactgtttattaagccaaatcaattaaatttataaactttacttgtttattgacacgattaagcgataatcttaaacagtactatttttcttaaatatcaattgtaaaggtgtaggaaatggataacgcaagcaagccgtctttccaaaacgtactggagtttgtgcgtatgtatcgtcgtaaaaacaaaatccgtcgtgagatcactgacaatgagaaaaagatccgtgataaccaaaaacgtgttcttttattagacaacttaagtgaatacattaagcctggtatgtcaattgaagatgtactcggtattatcgctaatatgcgtagtgactatgaagatcgtgtagatgattacatcataaaaaatgcagatctctctaaagagcgtcgtgaattgtcaaaacaattaaaagcgatgggtgaaattaaaaatattcctaatattaaaaattaattatattagctggcaaatccaaaggcctctgaatggttgttcagaggccttttttttcgttttttcatcatagttatggtcacacaagccataaaacaaaagagcctgctaattaacaggctcttggattaacaacggatattttatcgcgttatattattgcttcttttctcttatgactcactatgcgttgacgctttagtcatttcagatgaagcatgattagttgaacaatgaccacccgcaccgctacggccttgcttatcaaaggctggacgtgcatcccatgctttgatttcaattgctacaggcgcatctgtagatgccggagctttcgtcattggcgagctggcatgtaactggcgtactgttggctcttgacgaataacggtcactttagctggctgcttaacttcaaccgatacgacttcggtttccgttttagtttcagcaacaggctcggtcacttcaggctgtgtttctacaggcgtagattgagaagcagtttgctctacatgctgctcagccgcacattcagttgatgcttgggttgttgctggcatctcaggtacaggcgcttgcgttgtcatgtcactatgggtgtcttcactagcggtttcatgatcagcattagctatgactttattatgagtggtttctgttttctcttcggcaacatctgcttgctcagtcacttcatgtagataagcttccgttgtatttaataccgcagagatattctctttacgagtaacatgctcttgggtattaacgtcagcaataacgttgttaacagcgttttcttctacatgatcggcagttgactcattaacatcagcagtcgtttcttgcggtgcaatcgcgacaatttcagctacagcttcagtggttgattcagtactaactgtgaccgaataagtcgcttcagttgcttcagtatttgctgtttgagcctgagcaacatctgcagcaatggtttctgatacttctggtgcaatagcaaccatttgtggatctttatgagtaatgaagtttttagcaactgtattgtcagtgctattttcaacattattgtcaacaaatggtgcatcactaattggtgtgacagggtaatgaatacatactttacctgacgcaagctctggagaagctacggccatcgttagcggcataggggagactaatgtacgttcatcacgataacggcgacgacgttgcccactaacacgtaaatgacgaggtgaacggcgagagcgacgtggcatcacattttcttgttggcccgcattctcttcttttttcacttcttcttgtgcttttacagtatcagttaacgcattagcagaaacttgttcttgctcatctttaaccgtcgctactggtttcgcaacttgctgtttttctgatgatggtaattgactaaccactgtcgctggtggctcagaaaccggtgagtcgctcacagcaacatcaatagcgggtgttgcgacagcatcagtaacacgaacagattgcgttaattgacggcgagcacgacgaggcataacagggcgacgaggttcttctttcttctcagcctgttttgctgcattgtcattttccgctgtattttgtgcggctttcgcagcttcttgttgttgctgacgtttttcttcctgacgacgacgttgttctgcacgttgttcacggcgttgttgacgacgggcttcacgttcagcgatttcttgctcattactgacttcagtattggcattttgcgctttctgattacggttcttacgattttcttcgctcgttacgttatcgcgattgcgctcgtggtcacgattgcgatcattatcgcgttcacggcggttattattgcgacgattgttattatttcggcgctcacgacggttttcattattctcttttttgctttcttgcggtttttcttcaacgacaggctctggctgactcgcaaataagttagagaagaattttgcaatagcactaaagaatccaccactctctgttgtttcgcttttcttcacctgtttagctggagttggtgcagattttttcttattggtggtgtcagcgctattatcttgtaatgcaaaagcggatatcgccggttgctctggcgctttacgctcaggtacggcttcatcttctgcttcatttaactgagtttcgtgatattgcgctaaattgtagcttaatgaagagatctcttcgcccttgcgcacacgaataactgagaaatgcggtgtttgcatttgatcattaggaacaatcactactttgacattggcttggcgcaactcaatatcggtgacggccttacgtttttcattgagcaagtaagaggcaatttgtacgggcacaatagcgtgtacttcatgagtattttcttttaatgcttcttcttcgataagacgcaatacagaaagagaaagtgactcattatcacggatagtcccggtgcctaaacaacgcggacaaacatgatggcttgattcacctaatgaaggacttaaacgctgacgtgacatctctaataagccgaaacgcgaaatgcgacctatttgaatacgtgcgcgatcttggcgcacagcctcacgcattctattttccacttcacgctgatgacgaacaggggtcatatcgataaagtcgataacaatcaaaccaccaaggtcacgtagacggagttggcgcgcaatttcatcagcagcttctaagttagtgttaaaggctgtctcttcaatatcgccacctcgtgttgaacgagatgagttaatatcgatagcggttaatgcttctgttgtatcaataaccagagcgccacccgaaggtaaacggacttcacgttggaaggctgattcaatttgagattcaatttggtagtgactaaatagtggtacagcccctgtgtagtggcgaattttgctagcaaagtcaccacgaccaatggcttcaatatggctacgagccatttcaactactttagcgttatcaattaagatctcaccaatatctggtcgtaaataatcacggaaagcacgtacaatcacgttactttcttggtggatcagaaaaggagcagggcggctttccgctgcttttttgatagcatcccaatgtcttaaacggtagcttaaatcttgttgtaatgcttctgcggatttacccacacctgcagtacgaacaattaatcccattccatcaggaatatcaaggctagataatgcttcctttaattcagtgcgatcttccccttcaatacgacgagaaataccgccagcacgagggttatttggcattaataccaaatagctacctgcaaggctaataaaggtggttaaagctgcacctttatttccgcgctcttctttatctacctgtacgattacctcttgaccttcttttaaaacatctttgatgttaggacgaccatgtgagtgataattactagggaaatattcgcgggcaatttctttgataggaaggaaaccgtggcgttccgcaccataatcaacaaaagcggcttctagactgggttcaattcgggtgattttacctttatagatattggcttttttttgctcatgtccggggctttcgatatccagatcatacaaacgttgcccatcaacaagggcaacacgcaactcttcctgttgagtcgcgttaattaacattcttttcatattgtgacttactcgttattttcacgttttataatgtgccactgacatacgtaattacactattgataaccgatgacctcgtgtcttttacaaaggcgtcaacctcacggttgtcgattgtatagaggtgcaatttgtcggtgagtctgattttcagttctaaaattcagcactctttaattgagacgtaatgtgccaactcaataagtgatgtatttatggcatactaaattgtttgatattcgactatgtcttacgccattgctgcatttgaatatcaaacaaacaaaatttcataaatatacctgataaacttaatcaggagagtctgcattattccattggtgttggggttatagcaagatgacttttccgctttggtgactttttctgtataaatatgagagattagttaatgtttcgtctttttcccattaatcaggttaaaataggcacccaatttgatgttattttgtgcaccaataatttgtttgtcattttttattttaagagagctaaaaaatcgccactatgaaatcatttaatcaagttcagttcgtcaccattgatggcgatgaagcaggccagcgtattgataattttttactggcacgcttaaaaggtgtaccgaaaagtatgatttaccgaattatccgcaaaggtgaagttcgggttaataaagggcgcattaagcctgaatataaattagctgcaggggatagcattcgtattcctcctgtccgggtagcagaaaaagaagaacatgcggtatcgcctaagttagaaaaagtatcagcacttgctgagtgtattttatatgaagatgaacatgtgatgctgattaataagccatcagggacggcagtacatggtggtagcggactcagttttggtgtgattgaaggtttaagggcattgcgcccagaagcgagatttctagaattagtgcatcgccttgatagagatacctcaggggtattgttgattgctaaaaagcgctcagccctgcgttcactacacgaacagctaagattaaaacagatgcaaaaagattatttagccttagtacgtggtcaatggcaatctcatacaaaagtagtacaagcccctttattgaaaaatatcctacaaagtggtgagcgggtggttaaagtaagtagtgaaggtaaaccatcagaaacacgctttaaggtagaagagcgctttgaatttgcgaccttagttaaagcaagtcctgtcacgggacgaactcatcaaattcgtgtccatacattacatgccggccatcctattgcttttgatgatcgctatggtgatcgtgattttgatacacaattagcttcaaccaagcttaatcgtctctttttacatgcgagttcattaacctttattcatccctcaacaggggaaaaaatgcgtattgaagcgccgatggataaaacgttacgttactgtttacaagtattacgcaatcaaaaatcttaatactactgttttcaaactagcaaagtgggagaaaattttttcccactttgtttgcaaatgatttaccgttgtcgtcctagaaaataggatcagtatccagccaaggttatttggtgatggttgatatacattgctcaacaattttatcgatattccactctttcggtagcgatttagagccgtcttttctcatttccatatcaacacgaataaattcggtcataccataatctttgatgatgttgtcgtaagtacagctacaaacttcggtaatttgtggtattagtgcatcatcagtcacaccagaaccgagtatgcaactactaataaagttctttttaaatgaagatgcactttcatcttcttttttgggatcagtattttgggcaacattactactgttgtctgcttttacggctgaattgtcaggtgctttctcatcagagcaacctactaccgatgccgtaaggattaaagctgccaaaattgatgctaatttattcataatacgctttatcgctaaataagattaaaataagacaatcacgactattcctgattatctgtggaaagtaatgggttaattctttgtgagagtaacattttattcaatcggataagtggtaatccgattaaagaatttgggtcatcaccgcttaatttatcgaacagagtaattcctaacccctcagatttgaaacttcctgcgcaataaaacggcgtttctttatttaaatagccgataatttcatcatcggttaaatgccgaaagtgaacttgaaataattcacaatgactttcataggctaatgttgagctattatataaagttaatccagtataaaatgatacacattgaccggatgcttgttttaattgtgcaaaagcgttttcaaagttaaggggcttacccgtaatttttttattgagtacacaaacctgatctgaaccaataattaagtgatttgggtattgtacctctaaagcacgcgctttttcataggataaacgagtgactaacgcttgtgcacactctgtgggcaaaggggtttcgtcaatgtttggggaggcctgtataaagggcattccaagctttttcagaagctgagctcggaagggcgaagtcgacgcaagaaccagtggcaacatattttttataaaatccgtagcaaaatgatgcccgacattctaaactatgcgccgctgataaagcgaattttggtggaaaggtgtagataacccgcctttttctttgactatattccattacaaagataatatgcgcgccttatgcaaaaggtaaaattacccctgaccattgatgcgctgcgagcagcacagaagaatttagactatgacggtcaatattcctctgagcaagttagccgcttagctgaatcggtggtcagtgtggacagtaatattgatgtggctttatcatttgatattgaccatcaacgtttggcagtcatcaaggggcattccgatgtggatgtcactttagagtgtcaacgttgcgggggccattttccctatcatgttcacacaacatattgttttagccctgttgttagtgatgaacgggctgaagcattaccggaagaatatgagccaatcgacgtagacgattttggtgaaatagatttgctggcgatgattgaagatgaaataatcctcaacttgccggtggttccggtacatgattttgaacactgtgaagtgtccgacgcggaacaagtgttcggtgaactccctgaagaattatcagagaagccgaatccatttgccgtattagccagtttaaagaaaagtactaaggagtaaggtcaatggccgtacaacaaaacaaaccaactcgttctaaacgtggtatgcgtcgttctcatgacgcactgacagcaactcatgtttctgttgacaaaacttctggtgaaactcacctgcgtcaccatgtaactgctgacggttactaccgtggccgcaaggttatcaacaagtaattagctttatagctcgttgatactttgacaaatctaaccatagcgttagatgcgatgggcggggacttcggtcctcgtatcacagtgcctgcatgtttgcgggcgctggcatctaatcctcatttaaaaatattgctggtgggtcaaccagactctatctctcctctgcttgcaaatcaaaatgctgagctaatctcccgtttacatgttataccggctgaacatattgtcgccaatgatgccaaaccttcacatgctattagagcaagtaaaggcacatcaatgcgcgtggcactcgatctggtgaaaacaggggaagcacaggcatgtgtaagtgcaggtaacaccggtgtgttgatggggttagcaaaacttcggctaaaagcgattgatggaatagaacgtcctgcattggtttctgtgttacctaatcagaaaaaaagcaagaccgtcgttcttgatttaggcgcgaacgttaactgtgatagccaaatgttagttcaatttgctgttatgggtgccgtgatggcagaagaaattgcaggtatacattcacctaaagtggcacttttaaatattggtgaagaagagagtaagggattagataatatccgcgaagccgccaccgttcttaaggcgacaccaaatataaactatattggttatgtggaaggtaacgagttactgaccggcaaaacagatgtgttggtgtgtgacggcttcgcaggtaatgtttcccttaaaacaatggaaggggtgattagagtcttcctttcattgattaaatcttctactggtgacaataaaaaaacgtcgtggtggatgaaattattgaagaaatggttacaaaaacgcctaaataagcgttttggccatatgaaccccgaccagtataacggtgcttctctgttaggattacgcggtatcgtcattaaaagccatggtggcgcaaatgaaaacgcgtttacagcagcaatagaacaggctgttcaggccattgagcgacaaattccagaacgaattgcctcacgtctgaatacagtattacccaagagtgattgatagtatgtatacaaaaatcttaggtactggtagttacttgcctgtacaagtgcgaactaatgccgatttagaaaaaatggttgatacatcagacgagtggattgtcaccagaacaggtattcatgaacgtcgtatcgcaacagaagaagaaactgttgccaaaatgggtgcgagtgccgctgagaatgcattagaaatggctgatattgatagacaagaaattggcttaattatcgttgccacaacatcaggctctcatgcgtttccgagtgcggcatgtcaaattcaacacgccctcggtattgctgattgtatcgcgtttgatgttgcagccgcgtgctcaggattcgtttacgcgttaagtatcgctgatcaatttattaaggctggcacggtgaaacaagctttagtgattggtgctgatcgcttatcacatgcgttagatcctaacgatcgcggtacaattattcttttcggtgatgctgctggtgccgtcgttgtcggtgcttctgaagagtcaggtattatttctacacatttacattctgatgggcgttttggtgagctgttagctctgccttatcaggatagagaaaatcaagacttacctgcttatgtcaccatggcagggaatgaagtctttaaagtcgcagttcgtgaacttgcccacattgtggatgaaacattagaagcgaatcatattgataaatcggaactcgactggcttgtgcctcatcaagcaaatttaagaattatttcagcaacagccaaaaagctggatatgacaatggataaagtcgtggtgacattagatcgccacggtaatacgtcagcagcatccgttcctacagcattagatgaagctgtaagagacaatcgcattcaacgtgggcagttaattctgttagaagcgtttggtggcggctttacttggggctctgcacttatccgtttttaatattatcaggaaaataaacatgactgattttgcaatggttttccctggacagggatcacaagcgattggaatgcttgcagaacttgccgagcattatccaatagtgacagaaacatttgctcaagcatctgatgtattgggttattctctttgggatttagtgcaaaatggtcctgaagaagagttaaacaaaacatggaaaacacagccggcattattagcagcatccgttgctatttggcgagtatggcaagaaaaacaaggcaaaatgccacaaatgatggcaggtcacagtcttggtgagtattctgctttagtctgtgctggcgtaattgattttgctgcggcgattaaactagtagaattgcgcggtcaattaatgcaagaggctgtacctgcaggtactggcgccatgtatgcaattatcggattagataatgatgctattgcaaaagcttgtgaagatgcggctcaaggacaagttgtctcacctgtgaactttaactcacccggtcaagtggtgattgcgggtaataaagaagccgtagagcgtgcaggggcattatgtaaagaagctggagcgaaacgtgcgttacctttagcggtaagtgtgccttctcactgtgctttaatgaagcctgctgcagataagttagctgttgcattgcaagaaattgaatttaaacaacctgaaattcaagttgttaataatgttgatgtgaaagcacaaaccgatgctaatgctattcgagatgcattagttcgtcagctttataacccagtccgctggactgaaacggttgaatttattgctggtaagggcatcacacaattattagaaataggacccggtaaagtattaactggtttaacgaaacgtatttctaaagagatgaacgctgcagcagttaatgatattgcatcattagacgctgcattaggaaatgactgagggatctcatgggatttgacggaaaaatagcgctagttactggtgcaagccgtggtattggccgtgcgattgcagaaaagctaatagcatgtggtgctaccgtaattggtacagcaacgagtgaaaacggtgctaaagcgatcagcgaatatttaggcaataaaggtaaaggttttgtgttaaacgtcacagaaactgactctattgaaaaatttttagctgatgtgcgcgcggaatttggcgaaattgatattttggtcaataatgcaggtattactcgtgataacctgttgatgcgcatgaaagatgatgagtggcaagatatcattgacactaatctttcatcagtcttccgtctgtctaaagcagttatgcgtgctatgatgaaaaaacgttatggtcgcataattactattggttcagtagttggaaccatgggtaatgctggacaggcaaactatgcggcagcaaaagcgggtgtgattggttttagtaaatcattagcacgcgaagttgcttcccgtggcattacggtaaatgttgttgctcctggctttatcgaaactgatatgaccagagcgttaacagaagaccaaagagccggtattttatctcaagtgccagctaaccgtttaggtgatgccaaagagattgccagtgctgtagctttcttagcttctgatgaagcaggctatatcacgggtgaaacattgcatgtcaatggcggcatgtacatggtctaattacggggacgtctttatatttgctttttgcgtacaatataatgcaaaatatagcgaataaagtagtccacacagtcgggattggttagatcttttcctgtatttataaactaagaaaatcatcgcgcaagcgagttttgataggaaatttaatagtatgagcactatcgacgaacgcgttaagaaaatcattgttgaacaactgggtgttaaagaggaagaagttgtgaattcagcttcatttgttgatgacttaggcgctgattctcttgacacagttgagctggtaatggctctggaagaagaattcgatatcgaaatcccagacgaagaagcagaaaaaattactacagttcaagctgctattgattacgttgaaaacgcaggtaaataagcttgctaatctaggcggtcactcgaccgcctatattcttaatcctaaactttttccctccttggaggataagcgtgtctaagcgtcgtgtagttgtgaccggactaggcatgttatctcctgtcggtaataacgcagaagcttcttggaaagctgtgtgtgccggacagagtggtatcggccttatcgaagaatttgacaccagtcatcatgcgactaaattcgcaggattggtaaaagatttcaatcatgaagattacaatctttcgcgtaaagatgcgcgcaagatggatctctttattcaatatggtattgcagcaggtgttcaagccattgcggattcaggtcttgaagtaacagaagccaatgcaagtcgtatcggagctgctattggttctggtattggtggcttaggccttatcgaggaaaatcattcatcattaatcaatggtggccctcgtaaaattagcccattctttgttccttcaaccatcattaatatggttgctggccatttaagcattatttatggcttacgtggaccgaccatttctatcgcaactgcatgtacatcaggtgtgcataatatcgggcatgccgctcgtattatcgcttatggtgatgctgatgtgatgttagcgggcggtgctgaaaaagcaacaacaccattaggtgttggtggttttggtgcagtacgtgcattatcaacacgtaatgatgatcctcaagcggcaagtcgcccatgggataaagatcgtgatggtttcgtgttaggtgatggtgcaggtgtgttagtcctcgaagagtatgaacacgctaaagcacgtggcgctaaaatttatgcagaagttgttggctttggtatgagtagtgatgcttaccatatgacctctcctgcagaaaatggtgcgggtggtgcacttgcaatggaaaacgcattgaaagatgcgggtattaccgctgctgatgtcggttatatcaacgcgcatggtacttctactaatgcgggtgatattgcagaagcgcaagctgttgaaacggtatttggcaaagggactgatgtattagttagctcaacaaaatcgatgacgggtcacttattaggtgctgccggggcgattgagtctatctttactattttgtctttacgtgaccaaattgtaccgccaacaatcaatcttgataatcaagatgaacattgtcaccttgatttcgtaccacataaagcgcgtaaagttgagaacatggattatgcactatgtaactcatttggctttggcggtaccaacggttcgattctctttaagcgtgtgtaaaccgcttattcgcgtattgaattagtctaaagacccagacgtcatgctgggtcttttattttatctatagctttgtccttttacattaacttgtttatcatgtacaaaaaatatcaataacatagattataaataaggtgtttgatgtattgggtaaatggacaacagcaacaaagcatcaatgtgagtgatcgcgcggtacaatttggtgatggctgttttacaacacttgccgttgaacaaggtaaacctattctattatctgctcaccttaagcgtttacaacgcggttgtgatgcactgtttttaccctcaccagactggcaatggttagccagccatcttctacaaatagcgtccacaatcactgaaaaaagtgttattaaggtgattattagccgcggaagcggtgggcgaggctattcatcgaaaggctttgacacacccacagtgatcacatcctgctcaacttacccgttttattatcataacttacaaaagcaaggggtttctttagccattagcccagtgagattgggacaaaatagtttattagccggtatcaagcatcttaatcgcttagagcaagtgctgattaaacaccatttagaaacaaccccatttgatgacatgttagtgtgtgacaatgaaggatatttagttgaagcgaatgccgcaaaccttttctggcgtaaaggaaatcaattagttaccccggatattagtctttcgggtgtgaatgggatcatgcgccagcaggtattagattttgcgcaacaattggactgggatattcacattgtgcgagaaaaaccgcaaacgctctatcaagcagatgaaatttggttaaccaatgcactgatgcccattattcccgtaaaacagatctatttttcagatgataagcactatcaatatcgcgatagagacgcttaccatgttgttttacaacactgtttgtcactgacttaacgtttgatgagttataaatgaagataaaaaaattagtttggatagccttttttgcattattgattagcgctggcgcagccacattatatattatgcaaagccttcgtgggttagagaacaatgttgtggtaaagcaagatgaaatgctgcttactgttccggcaggaacagggcgtattgcgatggaacaattgcttattaagaataatcttcttaaacaaggagattattttcaaattttattaaaagtaaaaccagaactcagtcaatttaaagcagggacttatcgtttaacaaaaggtatgacactgcgagatgttttgctgttaataaaaagtggcaaagaggcgcagtttacgattcgatttatcgagggtagccgtttaagtgattggcaagctatttttgataaagctcctgagttaaagattgtcgcaaatggtatggaaagcgataagttacgccaagaaataggaatgaagcctgaaattacccatcttgagggttggtttgctcctgatacttaccattacaccgcaggcacgacggatatcgccattttaaaacgtgcttatcagcaaatggaaaaaacattagaagaagagtggctaaaacgcgatagtgatttaccctataaatctgcctatgaaatgttgattatggcatcgattattgaaaaagagacaggcattgatgcagaaagaaccaaagtggcctcggtgtttgttaatcgtttaaaacgtaatatgcgcttacaaactgatcccactgtgatttatgggttaggtgataaatatcgcggtacaatttatcgcagtgatcttaatggctatacgccttacaatacctaccaaattgatgggctaccgccaacaccgattgctatgccaagtgttgcttccattaaagccgcagcacatcctgcggatacacgttatctctattttgtcgcagatggcactggggggcataaattttctacaacgttggcggagcataataaagccgtcgcacaataccgacgcttacaacaaagataattatgaaaaacagcaaatttattgttattgaaggattagaaggggctggcaaaaccagtgctattcaaacggttgttgatacattaaaacaacaagggatcaccgatttggcctttacgcgcgagccggggggaactccgcttgcagaaaaattacgggaattgattaaacaaggtattgaaggcgaaaaagttaccgataaagctgaattgctaatgttatatgctgcacgagtgcaactggttgaaaatgtgataaaaccagctttagcccaaggtaagtgggtgataggggatagacacgatctctcttcacaagcatatcaaggtggtggtagaggaatagacaaagccctgatgaagtcactacgtgatacggtattagcagattttaaacctgatcttaccctttatcttgatttagatccggcagttggtctagccagagcacgagcaagaggtgaattggacagaatagaaaaagagtctatggactttttttaccgcactcgtgaacgttatcaagcattagcaaaagaagacgcctcgattattaccattgatgcatcacaagatattgataaagtacaagcggatattcgcgatgtactcaatcagtggctgactcaggaaaatagcgcattatgaattggtatccttggttaaatcaggcatatcgacaactggtaagtatgtaccaagaagggcgtggtcatcatgcgattttgttgcatgcatctcaaggaatgggggctgatgcactttcttatggattaagtcgttggttaatgtgtcagaataagcagggttcaaaaagctgtaatgagtgtcatagttgccgtttgatgttggcagaaacacatccagattggcatatcttgcaaaatgaaaagggaaagtcatcaatagggatcgaagcggttagaaaagtcaccgaaaagcttgagcaccatgcacaacaaggtggctcacgagtggtatggataaaagaggttgaggcattaacagaagcggcagccaatgcgttattaaagaccttagaagagccaccagttaattgctattttttattgaattgtcaacaacctgaaatattgctagcaacactacgtagtcgctgtttctattaccatttagcaccgcctgagatgaattatgcgatacattggctacaacaacagctacctaatatggcttatgccgatggtgtcacagcattaaacctatctcaaggtgcgcccgttttagcgttatcattactaaaacaagaatggcaagaaagagaagccttctgccaagcgttatatgttagcttacaacaacgaaatttatatgggttgttagctcagttcaatcaagataatgctgaacgtaagatctattggttattatcattactgttggatgctttaaaacgacaaactcatgctgaagtgtattgtgtcaaccaagataagcagccattaattatggcgttatcacagttgccttctgcaatgttgttagcggtgagcgaaagttggaaacagtgtcgccatcaattagttaccattccagcaatcaataaagagctattgttggcagaacagttacttgattgggaagcccagctagttgctctagggaaataatttccctttctatttagcagacaagtaaaagaaataatataaagttatataacgatgagagtacattatgtttttagttgattcacactgccatcttgacagcttagattatgaaaaactgcacaaaaatattgatgatgttgtagaaaaagcacaacaacgtgatgtcaaatatatgttagctgtcgcaacaacattacccggctttaaaaatatgcgcgaactgatcggcaagcgtgataatgtggctttttcttgtggtattcacccattaaaccttgatgagggacacgatgtcgctgagcttgcgcgccttgcagctgaggccgatgttgttgcattaggcgaaacaggtttagactactattatcaacaagaaaatgcgtcacttcagcgtgaaattttccgtgaacatattcgcattgggcgccaagttaataaacctgttattgtacatacgcgtagcgctcgtgaagatacgctaactattttaaaagaagaaaaggttcaagactgtggcggtgtattgcactgttttacggaagataaagaaacagcaatggcgctacttgatcttggtatgtacatctctttttcaggcattgtgacatttagaaatgccgagcaaattagagaagctgcacgtatcgtaccacttgatcgtattctggttgaaacggactcaccatatttagcgccagtgcctcatcgtggtaaagagaatcaacccgcttatgtacgtgatgttgctgagtatatggccgtattaaaaggggtgagcatagaagagcttgctcagcaaaccacccgtaattttgcaacactttttcaaataccaaacctcgcagactaagttgttcaatagaaatattggcgagtgatggctaggaattaaaataaataataaggtgataaaaatggcagaagagacaatttttagtaaaattattcgtggtgaaattcctgcagatatcgtttttcaagatgatactgtcactgcatttcgtgatatttcaccccaagcgcctactcatattttaattatccccaataaacttattccaacggtaaacgatgttactgcacaagatgaacaagttttaggtcatctatttgttgtggcagctaaaattgctcagcaagaaggtattgcagaagagggatatcgtttagtaatgaattgtaataaacatggtgggcaagaagttttccatattcatatgcatcttttaggtggaaaaccattagggccattattaagcaaataatctaatgtgataatagatcatcatggcaacaaggtagcagcatgataaaacaagctaaaagggtttattcattacttatagtattgttgatgacaacgttattggctggatgttttgcgtctcattcagacaataaactctattttaatcgtcaacaatctattgtgatggagccgtcggttttagctgtaggtattgtggcaggcaaaccattattgacgcgttatgaacaggggagtcgcgccacggtgacgttatcgaatacgcgatcttatcctgtctctattcgttatcgtttttattggtataacgagcaaggactggaaatttctccggcaggccgcgtaaatgatgtgatgattttgggcgatggtgatactgagatcagtgctgatatacccaataaaacagtgagttatgtcagagtctatctctttacttaggataaggtagtcatatgaaaaaaatgctatttgtggtggcagcggtatttttactggcaggttgtccatcgatgttaccacaacaacccccagcacctgtagagcctgttactcccacagagccaacagagccacctaaacctatcgagccacccatagaggttgtaccaacaccgccaaaaataaccagtattaattggaacgcggccattcagccattaattagagagatgtctgtcacggatgatttagcaactggcaaattattagtggttgataatgtaaaaaataattcgggcggaaacatccaagcagttaatgctactaacacaattatcgactcagtaaatagtattagtgcattacaaacagttccttatgcacaaatgatgtcagcaagaaaagcattaggactatccggtgaagatagcttaggattgcgcagtgcggcaattggtttagcgcgttatttgcaagcagactatattttgttttctactgtcgatggtaagaaagataatcgtgtgatcagcatgcaattaatgtcggttgcgagcggagaaatactctggagcgggcgccataaggttgagtaagtcttatcaacaacagttattgagcctattgcgggaatggtttcccgcaatacccttatcacagtggcaaataaccgccttagcgggattagggggcggcacttttcgtttgcaaagtaatgggatagattgggttgctcgttattatggcactgaaaaaacggcactttttgtcagggctaaaaaagagtcttcgattttaaaacagttattaaatactcagcttgcaccaaatattattaaacgccatggtgcatggttttttttccagtggctagagggtgagcatcttactcatcagcagttatttgacccccatctcaaatcattagctcatcaaattgctaagttacatcagcaaaaaccttttgggtttcctcttgatttgtggcatgaactttcagtctattggtatcatattgacagaaaacgattatcaccaaagtggttacgtttacatcacgattttttacgtcaacctcgacgtacactcataaaatacgcgccagctcacatggatcttcatcctgagaatattcttctgagcgattcaggtataaaatttattgattgggaatatgccgctgatattgatacggcagattcattaatgacattttttgccgcaaatcagttaaacagcgcacaacaaacagcatttttacatgagtattgtgcatatcatcactatactgaattaaataatgatcagcaaaataggcaacacccacaacagcagccgttttattcggttaacgtattaaagcagcgtattttattaagagaaccctttatcttgtatatgatgctgatgtggtatgaggttcgttggcaacaaaccaaagataacgcgtttttggctatgtctgaacctttacgtcgctattttagtctgatgaattgaaaagattttattattgcaataacaaagagaggaatgttatgggtcctgtaatgcttgatgttgaaggatatgagctcgataacgaggagcgtgaaattttaaagcatccccttgttggtggtttgatcctctttacccgcaacttccacgacgctgagcagttaaatgaattagtgcgccaaatccgtgatgcttcccatgagcgtttagtgattgccgttgaccaagaaggagggcgagtacagcgctttcgtgatggttttactcgcttacctgccgcgcaatcttatgctgcgcttaatgagcgctatcaagctagtcgcttagcacaagaggccggttggttaatggcatcagaaatgatcgcaatggatattgatattagctttgctcctgtcctagatcttggtcatgactgtattgctatcggtgagcgctctttccatgagtgtccagaaatcgctatggatatggcggaaagctttattaaaggaatgcgctctgcaggtatgaaatcaacaggtaagcattttcctggtcatggtgcagtcagagccgattcccataaagaaacgccacgtgatgagcgctctttaaacgatattcgtcaacgtgatatggctatctttaaagattttatccaacgtcaattattagatgccattatgccagctcatgttatttattctcagattgatgagcgtccagcaagtggctctccttattggttgaaatcaattttacgtgaacaactcggtttccaaggcgttattttctcagatgatttatctatggagggtgccgctattatgggaagttatgcgcagagagcacaacgttcattagatgcgggttgtgatatgcttttagtgtgtaataaccgtaaaggggcggtaagtgtgttagataacctgtcctttgtcaaagcagaacgcatttcggcgttgtaccatcaccgaggtcgttacacattaagtgaactgcaagcatctgatcgttggaaaaaagcgaatcaaatgctgacccaattacaggagcaatggcaggagcgcgcatgattatatatttacatggctttgattccactagtccgggaaatcatgagaaggtattacagctacagtttattgatcctgatgtccgttttctcagttacagtacgttgcatccacgtcacgatatgcaacatctactcaaagagacggataaactgattaaatcgacaaaacagccggtgctgatttgtggtgttggattaggtggctactgggcagagcgtatcggttttttatctaatattcgccaagtaatgattaaccccaatctttttccatatgaaaatatgactgataagattgatagacctgaagagtatttagatattgccactaagtgtattcaagattttcgctctaaaaatagagacaatgcattagtgattttatcccgtcatgatgagattttagataaccagcgttctgctgatgagttatcaccttattattcgattatttgggatgaaacgcagacacataagttcaaaagcttgtcagaacatctttttaaaattaaagcatttaatagcaaaatccccgcttaaaattggcttatgtaagatggacagagtgcattttgtccatctttttttgatttatattttttcttttttttattatttttagcccctctcatattccgactgaattattcacttatatcctctatctaattgatagttatggtaaaaaatagctatatgtcaataagatgttctattggcgaatgaaaaacaacctaaatgactcgattcatcaaaaaacaggtatgaaaattcaaatttttttgatataaatcaactttggtatgaccatattgccaatgagctttggctattatcaaaatcattgactgaaacgttttaactgtcgttatttaagtggatttaaccaagatgacttaaataacaacagtaaatatctttaggagtgacgttatatgtcattaacaaaaattgttatagtcggtggtggagctggtggattagaactagcgactaaattgggtgataagttagggcgcaaaaaaaaagcagaaattacccttgttgatagaaataatagtcacttatggaaacctctgttacatgaagttgccacaggctcgttagatgatggtgttgatgcattaagttatctcgctcatggttataaccatcactttaattttcaattaggcactttaacagggcttgatcgccaacataaaaatatcactttggctgctatttatgatgaaaatcaagagctattagttccagagcgtcaactcgattatgatattttagtcatggccttaggcagtaaatctaatgattttggcaccccagggatcaaagagcactgcatctttttagatagcccacagcaagcacaccgttttcataatgaaatgctcaatttatttttaaaatattcagcagactccaacgcagaagctgaaaatcgtaaagtaaatattgcgattgtgggtggtggtgcaactggagtggaattatctgccgaattacacaatgctgttcgccaactcaatagttatggtttaaaaaaattagcgccatcagcccttaatatcacgcttgttgaggcgggtgagcgaatattacctgcattacccgtgcgtatttcaagtgcagcacatcaagagctgactaagttgggtgtgcgcgtgatgacgaaaaccatggtaacaagcgccgatgaaaaagggttaaataccaaagatggcgagcatattgatgctgatctgatggtttgggctgcggggatcaaagccccagactttatgaaagatatcgctggattagaaaccaatcgtattaaccaattagtcgttaagccgacattacaaacaacattagatgatgcgatttttgcgattggtgattgtgcatcctgtccgcgaaaagagggaggttttgttccgccaagggcacaatccgctcatcaaatggcaagccgttgttatagcaatattttagccatgttaaagggtaaaacgttaaaagaatatgtgtttaaagatcatggctcgttagtttcgctctctaaatttagtacggtagggagtttgatgggcaacttaatgaaaggcgatatgatgatagaagggcgtattgcacgtatcgtttatatttctttataccgtatgcaccaaatcgcgttacatggttatcttaaaacgggtttgatgatgttagttggatcaatcaatcgtgtgattagaccaaaactaaaacttcattagtgaataatggtttatttttctaacttttgtttcttttagcaaacaaaagtttattttaaccccccgcagtatttatattgtcgggggttttatctatctaaagagtagtaataattgtgaacagtcaaaataagaatctctgaattagatgattaattcagtagaaaatatttatgtggatatcgaattaattttttaataatattaagcttcaatttcaaataactttatgaaaaatatagtgttatttctataaatttaattatttatatataaaaataatcttcaatagaataggggtttttcataaattaagatttttcttaaatagaaataggcgcttttaagaatttatttaggtcataaaatgttatggtatttaaagatacatattaaaacttataaataatatatgtgaataaaaaacatgtatttaatctattatttttattatctttatgtacaaaccaatctgttacgcatagtgaaaagcaaatcggctatgtaaaggttaatgaagaagtttcttaaaagagattacatttgttaacttgatgttatcattacgctatatttataaatatgtaaatgaaattagatttcattgatgagataagaaatatttaagttcattcttaatttttttgaaaataattagaaaatagcgcgtatttaattaactgattaaaacaataattagtggtgtatttaccatgttataagtacatagtttacttatgatgttaatcagcaaggacgtaataatatattttttcatataagcttattcattcaacatattgaattacaacgtggtgataaaagagtgaaatccgcttataacaaaaaaatagtaaaatagggataaacgcataaaaaggggaaaaagtgagtgttgatagcaaaaagttcacactaataggactaatccttgtattagctattcttttatttgtcgcttggaagtggatatttccacggccacaatttgcccatgtggtttcagcaacaccgattaaatcaaccgtttttgtgacagaagagtattgccatcgtattggactgcctacacaatttacaccagaaaaattatcgcgttttcatcccgcagagcaagagtgccgtgttttctatatgatagaagcgctaaacaataaaagtattgctcacttcccttatgctcaatttagagaatgtattcccatttaccgccaagaaaggcgagttatcggttatgatgtgctttacacaattgatggtacaccgggtaaagtgagaacgacatttaaaccgggcgatatcatcgcgctagatagcgatggccgacttgttttggagcaagagccatattgttctatgaatgaaaatattccttgccgtaaagagtaacggttttctttttagcattaacgctgataactgataagataaaaaaggcctaatatttattatgttaggcctttttgcattttattatctaaacagacaatgcgtttattttgtgttcactaaaagcggtgagcatatcgtcgataaaagtgagtcgtttttctcgatcggttaggcttatcataaatttcaatttggtagggccatctaaacggaagacgctcggttgctcttgcaataaaccgattaaataagtcgggtcgacattatttttttcaccaaactcaataaagccacctttgtcatgggcttcaatgcgagatatacctaaactcatggcgcttaatcgaatagccgcattacgtaataagttgcgtcctgcatcaggtaaggtgccgaatctatcaataagctctgcccttagatcattaagttcatttaagtctttggcactggcaatacgtttatagaaagagagtcttacattgacatcaggaatatagtcatcgggcaatagcaccggcattcttaattcaatttcggtttgctgattggtcagatcttctaatgatggctctcgaccctcttttaatgcttcaactgcactttctagtaactccatatataaagagaagccaacggtattcatttgaccgctttgctcttcacctaataactctcccgcaccacgaatttctagatcatgtgtggctaaagcaaaacctgcgccgagatcttctagggaggcaatcgcttctaagcgtttatgggcatctttagtcattgctttgggatgaggggttaatagataagcataggcttgatggtgagagcgaccaacgcgtccacgtaattggtgtagctgcgctaaaccaaagtgatcagcacgttcaataataatggtattggcactcggaatatcaatacccgtttctataatggtggtgcagagcaatacattaaatcgttgatggtgaaaatcgttcatcacacgttcaagctcacgttcacgcatttgcccatggccaataccaatacgagcttcaggtactaactgtgctagcctatcacgcgctttctctatattttcaacatcgttatataaatagtacacttgcccgccacgtaatgtttcacgcaagatagcctctctaacaaccagatcatcatattcgcggacaaatgttttaacggataaacggcgagcgggtggggtggcaataattgacagatcacgcataccactcatcgccatatttagcgtacgaggaataggggtggccgttaaggttaatatatcgacattggcacgcattgctttaatacgctctttatgacgtacaccgaagcgatgctcctcatcaacaattaataaccctaagtctttccattgaatgcccggttgtaataatttatgtgtaccaataacgatatcaatggtgccttctgctaatttttcggtgatctgctgttgctctttggcactacgaaaacgtgagatcatctcaatattgaccggccaattagcaaagcgatcacgaaagttttcaaagtgttgttgagccagtagggtagtaggcaccaaaatagccacttgcttattgttgcttattgcaagaaatgccgcacgcatagcaacttctgtcttaccaaaaccaacatcaccacatactagcctatccatggcaatggcttggcacatatcacttaatacggcattaattgccatctcttgatcgggtgtggtttcaaaagggaagctttggcggaaagtgtgatattgttctttatctaatttaaacgcaaaaccagattttacggctcgttgagcgtagacatctaataattccgccgccacatcccgcactttttcggctgctttttggcgtgcacgagtccaagcatcaccccctaatttatgaagaggcgcattttcatccgccccaccagagtagcgactgatcaaatgcagtgacgaaacaggaacatagagtttgtcatctcccgcatacgagaggatcaagtactctgcttttacgccacccgcttctaaggtggtcataccttgataacgacccaccccatgctgaagatggacaacaggttgtccgggacttaattctgccagattgcggatcaatgtatcggtattgatggtgcgacgattatcttgacggcgacggtggactcgctcacctaacatatcactttcgcagatcagcgctaactgacgataattgtcaataaagccatgctctgcagagccaataataaaataacaccctttctctttagcatccgctaattcaataatttgtttgggggcaattttaattctagataagagatcttgaacggtttcccgccggccttcactttcaaccgaaaaaacaatactgccagaaaattgctcttggaaacggcgtagattatcaagcggtgatttactttgtgcattgactgataaatcaggcagtggttgataacctaaattggtataacccgctttttccggcagtgcttgcgttttaagttgaatacgtggccactgttttaactgttgattgagcgtttcgacattaagccaaatatcatctggtggcagtaatggccgcatgggatcaacacgacggctttcataacgttggttgatatcttgccaaaatttatcagcgcaatcttgcagatcttgcgtcacaattaaggtgttttgtgggaaataagcaaataaattggataatggctgactaaaaaagagcggttgccagtattcaatccctgcgggtaatacttgcttacttacttgttgatagatatgttcaggatcacgtcttacttcaaaacgttcacgccattggctacgaaagagttcaatcgcattaggatcagttggaaactcatgagccggtaatagtttgatctgctcgacttctgttaaggtgcgttgcgtatcaacatcaaaagttcttaggctatctatctcatcatcaaaaaagtcaattcgataaggaaattcactgcccatcgggaataggtcaagtaatgcgccgcgtgttgcatactcgccatgttctaacacttgttctacatgacgataacccgcctcatcaaatgttttgcgtaaattgtcgcgagaaagttgctctcctttactcattattaatgcatgacttgcgagataatctgttgggcagactttttgcattaacgtattgacgggtaagattaaaattcccttgagaagtgatggaatacggtatagcgtagaaaggcggttagagattatttcttgatggggagaaaaactgtcgtaaggcaatgtttcccaatcagataatgtctctacaggataatcacaaaactgacggatttcatcttgtaaacgcagtgcattttgcatatcacgagtgacaagaacgactaatccagcatgacgtttgatgatttctgcacattctagggcgcaagcggcacctgtcagctgacccagctggcgagtatccccttgttttacaggaagttgataacgatattctgaggacataagcgtgtaatgtgaactcttggttgtagttaactcccaacacatctttagcgacatcgccaaagcttaaactggcgggcaggttaagataaaagaaaaaaccacagtttgggaatagagtggttccattcagtaagactaccctttattatccctgaacacttagcattagcaacaggaacagcacagttttcatgtacaattctgtctcattttttatagggctccgttatatgcggggtcgcgcagtcgacaaatttggtcgattcgtctcatggctatccgctttagggattatgctgggtgttgcggcattgatcacagtgacttctgtgatgaatggctttgaacgctcattacaaaacagcattttggcctatattccacaagctgttatcacaacacccaatgggcagctacccaaacaagatagtactgcacaaatgttattaaaacgagaagatgttatcaatgtcgttcctttagttgaaggggatgtggtattacaaagtaaagataatatcggtgttggcgtgatgttagggattgataaagcacaagatgaacccctaacacagtttattcgctatggcgatttctcgttattaaaaccgggagaatatggtgtgatcctcggtagtggtttagctaaacagctaaaaaccaaagaaggggatagcattcgccttattgttcccggcgtaagccaactcaccccaatgggccgagtgcctagccaacgactgtttactgtcaaaggtattttccaaagtggtggtgatgctgatgcttctcaacttctggtcaatcaacaagatgcggcgcgtttgatgcgctatcaacccggcaatattaccggatggcgtctattcttctcaaccccccttaatattgaaaaatacagtgctgaacctttgccagcaggtttaagttggaaagattggcgtgaacgaaagggcgaatttttccaagcagtgaaaatggaaaaaaatatgatgggcttattattaagcctaattattgcggtcgccgcgtttaatattattacttcgctttcattactggtgatggaaaaacaaggtgaagtggcaatattacaaaccatgggcttaaagcgttcacagataatgtctatttttatgctacaaggagcaggtgccggtattttaggtgctattgccggaggtttgttaggggcgttactatcaagccaactaaatgtgattatgcctgcggtagggcttattcctcatggggtagaattacccgcgactttagagtggagccgagtctttatgattggttttgccgctattgtgatttcactattatcgactttatacccgtcttggcgggccgcaactattcagccagcagaggcgctacgttatgagtaatacccctttattacaatgtcatgcactttgtaagcagtatcaagatggtgctatttcaacacaagtcttaaaatccgtctctttcgcgatcaatcaaggtgattttatggcgattgtcggcagctcaggttcaggtaaaagtaccctattacatttattgggtggtttagattctccaacctcaggtgaagtgatatttaaagggcaatcgctcaataaattaacttcaacggcaaaagcggatttacgtaatactcaattgggttttatctaccaattccaccatttattacctgattttactgcattagaaaatgttgcaatgcctctaatgattggtggaatgagtgcagtaaaggccaaacagaaagcgatgtctttacttgatgccgtaggattaactgctcgtgcacatcatcgtccttctgagttatctgggggagaaagacaacgtgttgctattgctagagccttagtaaacgatccggcgttagttttagccgatgagccgacaggtaatcttgaccaaaaaaatgcggaaggtattttcgaattactcatgaaattaaataaagaaaagaaaactgcctttttggttgttactcatgatttatctctcgcggcacgctttcaacgtcaacttgaaatgaaagatggtcaattagagtctcaagaagcgatttcaggagtggaataatggcgcagttgccacttgctttagttaccgcattacgtttttcaaaaggacgaaaacgtgctggtatggtgtcattaatttcgattatctcaacgctgggcattatgttgggtgtagcggtattgattatcggattaagtgccatgaacggttttgaacgtgaattaaaaaaccgcattctttctgtggttccccatggacaaatttattcggtagaacaaccctttatatcttggcaaccggcactatcgcggattgaaaatactgagggtgttgttgctgctgccccctatattttattaaccggattacttgaaaaaggaaccgaattaaaagcggtacaagtgatgggggttgaaccgaataaacaaagtgatatcagtttattaccgagctatgtgcaaaataatgcatggcaacattttcaagcgggtcaacagcaaatcattattggccaaggtgttgccgatgccttaaaaatcaaacaaggtgattggttaactattctgatccctaacaatgatgatccgaaaaagctattacaacctaaacgcattcgtttacaagtcagtggtatatttaaactcagtggtatgctcgatcaccaattagcgttaattccattggcagatgcgcaacagtatcttgattacggcaaaggaattacgggtattgaagtgaaaacaagcgatccatttctagctaatgaaattattcataatgcaggcttaaatagccaagcctatgtttatgctaaaagctggatcagcgattatggttatatgtatagcgatattcagatgatccgcagcattatgtatctctcaatgattttagtgattggggttgcttgttttaatattgtctcgacgctgattatggcggtaagagataagagcggagatattgctattttacgaacgttaggtgcaagggatagccatattcgcaatattttcttatggtacggactgttgtcaggcatgatcggatgcgtggccggtgttattatgggggtagttgtctcactaaatttaacccctattgtctcggtaattgaatccatgacagggcatagtgtgttatcaggagatgtctattttgtcgatttcttaccttcagaaatacatgcaattgatgttttctccgtatttttgacgacggttattttgagtttgattgccagttggtatcctgctcgtcgagcaactaaactcgatcctgctagaattttaagtggacagtaagtttattgacataaaatggatataaacggaaataagacagtaaagttatcaatttttattgattgttaaatataaaaaccaaggattgccatgatgaaacttaaacttcgtcatcgtcggcttaggaagtttcgtaagataaaaagtttacgtagacaacactcacgttgtcgttattttcatttaacccataaaacggaacatgaaatgaatttacccaaagtagtggtgctaaccggggcgggcatttcggctgaatcaggtataaaaacctttcgatcagaagatggattgtgggaagagcatcgcgttgaagatgtggcaacgccagagggatatcaccgcaaccctaagctggttcagcagttttacaatgagcgccgtcgtcaattacaacaaccctcaattcaacctaatgaagcacattatgcattagcaaaacttgagcaatatcttggaaaggacaatttcctgctggtcacgcagaatattgataacttacatgaaaaagcagggagtaaacatattctccatatgcatggtgagttattgaaagtccgctgtccgcaatcaggtcaagtttttgaatggaaaggggatttatcaacgacagattattgccattgttgccaatttccctctcctctacgtccacatattgtttggtttggcgaaatgccaatcggcatggatgaaatttatcacgctttagcacaggcagatctctttatcgctattggcacttcggggaatgtctatcctgctgctgggtttgtccatgaagcacggttaacaggggctcacacggttgagcttaaccttgaacctagcttagtggagagtgagtttgaagaaaaacattatggccccgcaagccaagtggttgatgcatatgtccataaattgtttgatttaattaatgatcctaaagctgatttgacgcaataattattttatagagttccctattattgttattagagagatttagggggcaaaatggataaattattagaacggttttttgaatacattagttttgatacacaatcgaaaccatcatcgaaaatgtcaccaagtagcgatggtcagctaaaattagcgaaggcactggtacaagaattaaaaaaactgggtttttctgatgtgacactcagtgataaaggatgcgttatggcgagtttgccctctaacgtatcttggcctgtacctgttattggctttatttcccatcttgatacttcacctgatttttcaggtaaacatgtaaaacctcaagtgcttgaagattaccgtggtggtgatatcgcgctaggtattggtgatgaagtattatcaccggttatgtttccaattttacactcaatgattggtaaaacattaattacaacggatggtaaaactctattaggtgctgatgataaagccggtatcgcagagatagtcactgcgatggtacgtttaaaagcacaaaatcgacctcatggtgatatccgtattgcatttacgccggatgaagagatagggcgtggtgcacattatgtcgacctaaaagcatttggtgctaactgggcatataccgttgatggtggtggtgtgggcgaattggaatatgaaaatttcaatgccgcttctgtgagtattaaaatcgttggtaataatgttcatcccggtagtgccaaaggcgtgatggtaaatgcgttaggactcgcttcgcgtattcaccaagaattacctgttgaagagacccctgaaaacacagaaggctatgaaggtttttatcacctacaaagtattaaaggtacggtggaaagagccgaaatgcactatattattcgtgattttgatcgcaatcagtttgaaaagcgtaaacaaaacatgatcacgattgctgaaaaagtaggtaaaggtctacatcctgattgctatattgaactaactattgatgatagctactacaatatgcatgataaagtggttcagtatccacatgttattgatattgcaaaacaagcaatgattgattgtgatattgaacctgatattaagcctattcgtggtggtacagacggtgctcaactctcttaccgcggattaccttgcccaaatatcttcacgggtgggtataattttcatggcaaacatgaatttatctctttagaaggtatggaagccgcagtaagtgttattatgcgaattgctgaaattactgccgaaagagaaaaagcaaaagttatttgttaatagagcagttatgtaaaataattgccccataatagccgacaatctcggctattattttatctttgtcttttaaatataggtttgttttcatataatttaaaattaaactttaaaaataagtttgttttttataagttattggccgattatttcaaataatattctttataatctaaataaaatgatataaggatatttgcgtaatggctgtactctccaaaataataataaaacaaacaagatcagaatgtctgtgtaaaaaaataccgataaccagtgataatacttttagtaaacaagagtataaagcatcgtttattatcgttttcagctattttttaattacccatcttattatattttctttatatttatcaaatgataagcatacctggttacttttagggctacagagtgcgttctttatcattttgccatggttattttatggcacaagaacgttactaaaagaggcaatatattatttaataagataacagttactgtttattaacatagttaaaataacacccagctataattagctgggtgtgtttgtataaaaatagtttatttatacttaatcttcaaaataccaatagccttggttaacaagatgcgtcaataagcgtataaattttggatctgctaaagcatcacctaaatgttgtttatcaatacaatcatattggcaaagggcatctgcagcttcaatatgatgagtatccattaattcaccattaacaaagcaactatcaccaacacgcagtgcgcgaataccgtttaaacgatgaagttgttcaccttgttgcagtaaatcgtggatctcagcattttcatataaaggttcaggaatggccaagtcaagttcatggcgagattgagaaataaactccccaaaccaatgacggaatacttcgggttgggcaagtaagtcttccatcatatcatgcaacttatttaattcttgatgctggactaatgccggattatctcgaggagtaagatcaggatcactgtaacggtagcttcctaagtcatttgctaaaacatagtcagcaaaaccgctaaatagctctcgtgcattaggtgctctaaagccaacagaatagtttagtgattcttcaatggcataaccttcatgaggaaatccaggtggaatatacagaatatcacccggctctaattcttcatcgataatggcatcaaaaggatcaacttgaagtaaatccgggtgagggcagtgctgtttcattgggattttctcacccacacgccaacgacgacgaccttgcccttgaataataaatacgtcatattgatcaagatgagggcccacaccgcctccgggaacagagtaagagatcatcaaatcatcaatacgccaatcgggcaacacacgaaaaggtttcatcaatgccgcacttggaaaatgccagtgatcgaccgcttgaactaataacgaccaatctttatcgcccaaaccttcaaagtgctcaaaaggcccatgtttaactccccactgcccatcttgacaactcacaagacggctatccacttcatcttccattgcaagacccgcaagttcatcaggagataaaggatcaataaaaccagagaagccgtttttgattaataaaggacgtttttgccaatggctttctaaaaatgattgccaatctaaattaagtttatagtccattgtgtatttcctgaatttgggaagcctaaaaatatcatataatgaattacaacttcctgctaaacattccttggtgcaatgtgagtaataacgagtaatatactgacaactgcgtagttatcatacatctcgcaatcttattgtgataagacctaaattgaatcagcaataatataagttgatagagaagagcgttactctatttcagtagtgagttgttgctcagcaaaggtgacgatgagtctcgccccccctaatggactatcggtaatggtgatatcaccgttatactgctcaataatatcaacagcaattgataatcctaagccttgtcctgggcgcaatgtatctgcacgtgtaccacgctgaaaaataagctcccttttttctgggctgactcctgggccatcatcatctacggtgataatcacacaattgtcatcatgacttacattgatctcgacaaactctaaacagtacttacaagcattatcaagtacatttcccatgacttccataaaatcattcttttcacctaaccacatcatttcaggggaaacatttaatgttatatcaacgcctttggattgatagaccttattaagtgcactacaaagattgtcaagtaagcctgataaagagtggagcttacgtgttgttatatcgtgatcgccgtgaagagaagctcgatgtaaataataaccaacttgctgtgaaattcgttcaatttgactttgcataattggctcagcttgttctatagacatttgtttgccagcacgtagagcacgtaatgttgattgtaaaacagcaaggggggtttttaagctatgggtcagatcagataaactggtacggtatttactataacggttgcgttcattacgcaataaaatgttgagattataaactaatcctttgagctctttaggaggattttcatctaaattatcgcgagtgcctttttccaacgcgctgatctgctcaataatggatttaatcggccttaaactccaatgggctgctaaccaaattaatgggatcaccaaaagaaaattagctagtaatatatagagaaaccaatcccagactctacttacattttgcagactttgaggaataggatcgataaccgcaatggatagataaggcatattatccgccgcaggatagtgattaataaccacggaatgcgttaaggtatcattacttgaatattcgttgagtttttttagataggctcgatattgaggcagttgctgtaacataaaacgtgtcgttttaacattcacactaatttcaaataagccttctttattgcgccattttggcgcgatactgtttgggatcacctgaggtaaatccgttggcgtccatagcacattgcctttctcgtcgaaaataaccaccagcgatgtgttgttgttattgaggttagtcggaaattcaatctgcaattgcccatctttccattgcgctaagctatagtagagattactttggctacgcattagcataaaagtcgttttatcaaaactgacaatagaaccgactatggcaaccaaaccataagagagtgtcagtgctaaaataatggcgctggtggcaagtaaaaatcttgttcgtaaagagaagggcgaacgttgttttttatgcatattaagctttcatatcaaaacgataaccttgtccacgtacagttacaatgacatcattatcatatttttggagaatttttttgcgcagacgccccataagaacatcaatggtatgactttctcgctgctctgcatcaggataaagttggcgcattagcacatctttgctcaccactttgttttgattacgcattaatgtttctaaaatagtatattcgaatgcagtgagcttgatttgctcacctaagatcatgaactctttacgtgataaatccaactcaaaaggggcaatagtcagtatttgtgatgcaatgcccatgtttcttcgcattaatgcctgaacgcgtgccacgatctcttcaaaatgaaaaggctttgtcacataatcatcagcaccggcatttaatgcggtcactttttcctgccagctttctcgagccgttaataccataatgggaatagtaatattattttcccgccatcgacgaataaggctgataccatcttcatcaggaagacctaaatcaacaatggcgacatcaggtgtactttctgcgataaagtgatcggcttctttcgcatcctgtgctgcatcaacttgatgtcctgcatcgcgaaactgcacagataaatgatggcgaagtaagatattatcttcaataattaagatccgcatattccaccttgtgtacatcagtaaaaatcagttgctataagagaaattaagataatgatagtcaatctagcacttaaagaataccgtaacggacaatgtgtttaagttatagatagtttttatcttatttaggacgggttatcgatataaaaaaaggcagagattatctgccttttaagtatgggataaattaatctaatttatcaacaagttgactggcaaaaccaatatagctttcaggtgtcatcgcttttaagcgtgctttttcttgttctggtagcgctaaaccgtcaataaacacaaccatatcttgtgccgtgatccgtttaccacgagttaactctttaagtttttcataaggcttttcaataccatagcgacgcataaccgtttggattggttcagcaagaacttcccagttgctatctaactcttcacgaagatgactttcattaacttctaatttatttaagcctttcatggttgattggtaagcgattaatgcataaccgataccgacacctaggttacgtagtacggttgagtcagttaaatcacgttgccaacgcgaaactggtaatttgctggaaagatgccccataacggcattagctaaacctaaattaccttcagagttttcaaaatcgataggattcactttatgaggcattgttgatgagccaatctcaccggcaatggtcttctgtttgaagtgattaagagcgatataaccccaaatatcacggtcaaaatcaattaaaattgtattaaagcggctgatgcaatcaaaaagctcggcaatatagtcgtgtggctcaatttgagtagtatatgggttccatgtgatccccaatgaagtaacaaattcttcactaaattggtgccaatcaacttcaggataggcagctaggtgagcattatagttacctactgcaccattaattttacctaaaatttctacttgagtaagctggcgatattgacgctccatacggtatgcaacgtttgcaaactcttttcctaccgttgaaggtgttgccggttgtccgtgagtacgagaaagcaggggtaaatcacgatatgcttgcgccattttactgatagtatcaataagctcgcgccatgcaggtagtagcacttcttggcgtgctgtttctaacatgatggcatgggataaattattaatatcttcagaagtacaagcgaagtgaataaactcagaaacttgctgtagtgcagggatagctgccactttttcttttaagaaatattcaaccgctttcacatcatgattggtggtgcgctcgatagttttgatacgggcagcatcatcttcattgaagttagcaacaattgcatcaaggtaatcgattgcgttttgttcaaaggcgggaacttctttaatgtcggtgcaagatgctagcttttgtagccagcgaacttctacctgtacacggaatttcaaaagaccgaattcactaaaaatagtccgtaacgacgaggttttactaccgtaacgaccgtcaatcggtgaaatcgctgtcagcgaagataattccattgttggcaactcccaggttgaattttaaagtattaacattgagcgagaaaatcatcagtttgtcgtaagatggttttttgatggagtaaaaaatcaaaacggcgaccacctacttgacgccaaagtacggcactacgaagacctgtcagaagtaatccacgaactttggcttgaataatagggtttttaagtaactcaatcgaaccattaacttgaatttttggccctacagggctgaccgcatcactataaacgccagcgagagcattaaataatccgtcagaaagcggttcaaaataatttttttgtcgttcaagttgagatattttttgtgacaaatgcgaactgtaatcgttatttttgttgatgatacgttcaaggttaatcaggccttgttgataagtcatcaactcaaacgtgagtttttctcttcttaccgcttgatggatagcttttatggtttgaaaacctaatttcaaatgacttatttgattactataaacatccaaggttgaagttgggttgatattaaaaatgctgttaaccatgacttcaacatctttctcgtctgcattcccttgataagcaatttgctgaacaagacgacttgcctggcagatacctgccagtgcaagggtaatatcacgaaaatctttagccacatctactcctgaatacgtgtttcaataataccgccacctaaacagacttcgtcttgatagaaaacggccgattgccctggtgtaacagcagcaacaggatagtcaaaacggacttcaattttatcttcatctaatggtgttactgtacacggaatatcagcttggcgatatcgtgttttcaccgtgcaacgaaaagcttcggtaataggctctcttgcgacccaatgaagttgttgagcaattaagcctacggacattaatcgagggtgttcatgaccttgtgcgacaattaatatgttatttgcaacatctttatcgactacataccaaggatcttcgctaccttcttttgtgccaccgatacccagacctttacgttgacctaaggtgtgatacatcaacccttgatgttcaccaatggtttcgccatctacggtgacgataggacccggtttggcaggtaaatagcgcgataagaaatcagtaaacttgcgttcaccgataaaacagatccccgtagagtcttttttcttggcggtggctaaatcaagcttctctgcaatttttctcacctcaggtttttccatttcaccgacagggaaaaggctttgggcgatttgctgatgacttaatgtatataagaagtagctttgatctttgttgttatcaacaccgcgcagtaattggcttttaccatcaatatcacggcgacgaacatagtggcccgttgcaatatagtcggcccctaaatcttcagctgcatattctaaaaatgctttaaattttatctctttattacatagaatatcgggattaggggtgcggccagctttatattcagataaaaagtgttcaaatacattatcccaatattcagcggcaaaattgatagtgtgaagttctatgccaagcttatcgcacacggcttgcgcgtcggcaaggtcggcagaagctgagcaatattctgtatcgtcatcttcttcccagttcttcataaacagaccaacgacctgatatccctgttccttaagaagataggctgagacggatgaatctacgccaccggacattccaacgatgacttttttttggctgttatctgacatgaatggatctcactgcggaaaaataagcgccatactttaccatatcactatcaagggtgcatcaaacgaatacattttttgccttcttaactatgaaagtcattgttaagaggcaaatgttgaaccaaagctatccagtaaagagagtggataacgttcattttgttgataacaaagaatactttcttttaccagcggtgaacgtaattgttggctattgattatctcttgcgcggtcacccagtagcagccattaatatcatcgtcatgtggttgtgtggctaattgttctggtgcttctatcaaaaataaaaaacgcaaaaatggcgtattgtccggtgccacccactgatgtaatttcaaaaaatattgtaccggcaaggttaaaccggtttcttcccataactctcgttgtgccgcttggatcagggtttcatttgcttctaaatgtcctgcgggttgattccatgtggctttgccatttaccgtttcttcaacaactaaaaatttattgtttgcatgaacaatacaagcaacagtgacatgtggtttaaacaaaattaatctccttccattgacccggtaatagattatccaaggtaatatttcccatgctaaaacgaattaagcgtaatgtgggataaccaatatgggcagtcatacgtctaacttggcggttttttccttcaaataaagtgatttttaaccagctagtcggaatagattgacgctctctaataggtggaaatcgcgtccaaacccacgttggctgttctaccctttcaatttttgcaggtagtgttttcccatcctttaggttaagtccttcacgaaattgttgtaacgctatctctgtgggaatgccttctacttgagcatagtagactttccctgtttttttatttggttgagttaatttggcctgtaatttgccatcatttgttaatactaacagaccttcactatctctatctaaccgtcctgccgcataaatatcaggaatggggataaaatcttttagcgtttttctaccgctgtcatcggtaaattgcacaaggacatcgaagggtttattaaagataatcactttacgctcacctctagggcgagaaggttttttttgtcctgctagtgcgtgagatttgcgtagtttcgatctattgttaaattgatttgccatagctattttttgtcaaaaatgggagattgattataccttaaaagagaagcgattggcgttagctgaataatcaagtagtattgacaggtctcttacaaaaaattaacaaagcgtgcgcttacatgaaaggagaggtaaatggaaagcaaagtagttgttccggctaatggtgctaaaattacattagatgctaaaggtaagcttgttgttccaaataatccggttatcccttatatcgaaggggatggtatcggtatcgatgtcacgccagcaatgttaaaagttgttgatgcagcggttgaaaaagcttacggcaatgaacgtaagattgagtggatggaagtctacaccggtgaaaaatcaacacaaatttatggtaaagatgtttggctgccagaagaaaccttagatcttattcgtgaatatcgtgtttctattaaaggtcctcttactacaccagtaggtggtggtatccgttcattaaatgtggcactacgccaacaactcgacctttacgtttgcctgcgcccagtgcgttattacaaaggcactccaagcccagtaaaacacccagaactgacggatatggttatcttccgtgaaaactcagaagatatctatgccggtattgagtggaaagccggctcagcagaagctgataaagtgattaagttcctgcaagatgaaatgggtgtaaccaaaattcgcttcccacaagattgtggtatcggtattaagccatgttcagaagaggggactaaacgtttagttcgcgcagcgattgaatatgcaattgataacgatcgcgactccgttacattggtgcataaaggtaatattatgaaatttaccgaaggtgcctttaaagattggggttacgaattagcccgtgaagaatttggtggtgagctgttagatggtggcccttgggttaaaattaagaaccctaaatcaggtaaagatattattgttaaagatgttatcgcagatgcattcttacaacaaatcctgttacgcccagccgagtatgatgttatcgcttgtatgaacctaaacggtgactatatttctgatgcattagcagcacaagttggcggtattgggattgctcctggcgctaatattggtgatgagtgtgcattatttgaagcgactcacggaacagcaccaaaatatgccggacaagataaagttaacccaggctctattattctctccgcggagatgatgctacgccatatgggttggacagaagccgctgacttaatcattaaaggtatggaaggcgcaatcgaagcgaagaccgttacttatgatttcgaacgtctaatggacggcgctaaactgctgaaatgtagcgagtttggtgacgcgattatcaaacatatgtaattattgatttgataaatagttaacgggagcttattagttcccgtttattttttgtactataaaattattccccaaaaccccaccaaaactattccccaaaactgtttaattaaacagcaataatttgccattctttgcctctatcgtcgtgatatttatcagtcattttttgggttttatggcctaataatttttgtgtatttattccttgttcgcgataaagtctctcagacaaagagcgttgttcgtgaaaggttggtgcagtacctttctcccaagttaacccacacttatctcgcgcttttttaaacgttgtggttaatgtatttggcgtggcttgttcgcctcgttttgcttgggatgttgtatgccgataatgtacaagatatttactcacaacggcatcacgacaccttgcaatgacatcccttaaggacatattaagggcatcgcattttaatgataatgggatagctaatttactgcctgttttttcctgctgcacatgcaacatgtcatcccaaatatccgtaaatttcatattacaaatatcacctattctttgaccagtaattaacgcaagcaacattccacattgcaggtaagggggatgcttttcagcttgtagataaatagtattccactcatcaagcgtcatacgctctcttttaaccctatttctaggctgttttgttgctttagctggattgtaaccaggaggaacgtagccagcatgttgagcttctttaaatacatcaatgagcaccatgcgaacgacctgagccattcttgaatgtcctaatgctttgactgaatctattatttcggcaatatctaaagcagttatctctttcaatattttcgtaccacaatactgacgaaataaattaataggtttcattttctgtcgataagaattaatttttaattcaccgatatctaatctttctttttgaatatccaaatatttatccacccatatatcaacagatatttcagacttgtttgtcttaatttttgataaccgttcattaatacttaataactgtcgagtatgttgttcagcaataattgtattggcttgaatagccgtttctctcgcttcttgctcgtcggtgcctaaactatgaaattttcccgttatagggtgtttatattgccaataaatttttccattacgcttatctaatttacggtataagttaggaatggttattttatgggttcgcggtctggcagccatctgaaattatcctctgaagtcgctccgttgatttagtcggaatttttggtaaagataaataacccacataacgagcttctctatcgaccatccactttctaccaactttcattgctggaggtgcgataagattatttcttgcgtatttttgtaataccgttatgctgggggattcttcaccaaattccaacatagcccacgcctcaagacttaccattcttgacatattttctctccacactgtccgtacacagtttaaatagatattcgttaatgctggtggtaattatttactgatctccttaagaaaagagatccagtgcgttttatcgttcttacctacacgctgtaccgctgttggtttttggtctgttagtgctaaaatttgtttaacaggtatttgggtttcattccatttgaacagcaatgttcctccaggcctaagcactctaaatgcttcactaaacctttttgataaatcgtctttccatgactctttatttaatcgcccgtactttttaaacatccaactatttttaccaactctaattaaatgaggtgggtcaaatagtacttgataaaaggtattatctggtaatggcaggtttttaaaatcagaaataatatctggtgttatatttaaaattcttccatcacataaaatatgttcttcagctctaatatcattaaataaaactcggtcgtcttgtttatcaaaataaaacatgcgagagccacaacacatatcaagtattggtttcatttttatataccaactttgatttaatccaattttcagcttcatcattgcataacaaaacactatccatcattaattcaatatcgatagattcctttgcaatgtgagataatgcattcataaacattgcaaacggtttctcatcacactctataaagttagctctgtatgcgctaattaaatgattgcgagcatatagaacgcctaatttcatttgttctctattgtatttatccatcataccacctttatttgctttaatgcctcgcgaacagcgtttaatcgtgattccattcttagatattgagggttaggtatagtgggccaatcgttataccaagcatcatcaccaaacaaactaagcaacttaccacctaaaaaactattacagcactcatctttaacattatctgatgcttcgattaaatcccaatattcccttgcttcatatttatctatttcattatcgttgcgtagtttgataacttgttttttagcgtattcagcatttgcatcgtcatcatcatctatctcatagattaaattagaatctaacttgcctatccagtagtgattattgatacgctgaataaactcaattagtgggctacccatcgagccccaaaagcaagaccatgaatttccccattcgctaatagtgacacgaccgttttgattatctccataatcctcaaggtaaacatgaatagggtcgtgacgctcgacatcagttattactaacttagtaacttgagattgttcaactttcatcgttgcaccttatccctctgtcttcacataccaatcaacaagattatcaattgcagtattgatatatcctgattgctcttcttcggttaatttatcccattcgtcctcagtaatacccagcccacattcagagtcagaaccaaccttatttgttcttgcaactaaaaccatccgcttactcatattcattcctcttattgcatccctgcgagttaattagtccagctgaatggcgccttcttctggatattcagtacagtaaaatacatgcacacgaccggtttctttgtctctacatggctcgatggtgtattcagtctcatcattaatgtctaatccgtgtgtgtctacctttaagccagcaaaatcagccatagccattatttgctttgttgttaatgtaatagccatatctatctcctgtttgcatccttgcactgagtaagtgggttaaaccacattaattaaatggcgtggatacataagcccaataggtgcgaagggaatatcatcctcaaaatccattggtggctgactactctgtgcttgaggttgagccggtggcgggttttgctgtgccggttgtgaacctgctgatttactagcaccacctagcatttgcattgaaccgccaatctttacaacaatttctgttgtatagcgtttaacaccgttatcatcccattcgcgcgtttgtagttggccctcgatataaacttgggagcctttacacaaatagccactggcgatatctgcaagctttccaaacaaaacgacacgatgccattctgttttttcgcgattttcacctgtttgtttgtcacgccatttctctgatgtggccacagctaaattggcaacagcaccaccagaaggcaggtagcgaatttcaggatcacgccctaaattgccgataagaattactttgtttactgatccgttagccattttcagttattcctatttgagtaatatcgccaccaataagatggcgattaattaataattaagctgaaaacttgccaatgaatgtttcgatatcactttcatcaaattcatcacaaagtagattgcgaaactcttgagcgatttgttcttcaaggttttcaagttggacaatacggagcactaaaacgggaacatcaccgccagtaagcacgctataacgcaatttaatactacgttcttttaactcgtcatatggggtgcaggtaaactggaatgcagtaggcataacatctttgcttcttgcttcaacattttctaatactgaacgtttggcgctaaaatcgtgatcttcatgttcagcagagcgtgttgattcaattgtaatacggcggacagcagaaatagcttgtttgatatctaaaacattgccgtcagcatcaaacgccattaaataatcacgccagtcttctaaccattccgctaattctttttgacgatgtttaacaccatcaatttttaatagtgctgcgaatggggcagtttgttttaatttcacaagagcagtattatcagcatgaccaggctcaccaattgtgccgatattaaaaatagttttggcactcatttcatcggcatcaataaagcagctaacaccttcatcaattgcatttttgattgagtatttaacaaagtcactgatactggttgttttcatttcaccacggaaacggaagcgaccttcttgtaaattttccaaactactcactttaaattcatttggaagaacaatggcggggcaaagagatttctctattgcttcgagacttaatgaagccactgccatattttgaatttgcgaaatagcactaccgtctaattgagacatgaataaactcctacttatttaaaagcattaaattaaatggataggtttaattaaaaataaggaaactaattaacggattttaatttcccgtcgggctgaccttgcaaagaaaataattgaccttggtcttcttgcataatggtcaacttaccacctttacctacgtacattggtgttttagtagtatcttcttcagcccgtttcccgcgtggtgttggtgcagagaacttaagtttatgagttatttcaactcgtttttcttccattgaattactaaggcgagcaaaatctaattcaatagtgactttgccttttccaccattatttaaaacgcctaaagccacatcatttaaaacagcagagactttattttcaaaaacgccagcgtccaattcggaaagaaagtcagggacatttgtcttacgatcttcttggctcatttctataacctcacgttatcacttcacacaataagaaagggcactagcgagttgacataatcctgataagacatttcacaaataatgccagtacccttgcttattgttagactcataatcaaaaagagcggaccacctgtggttgcatcagcccgattgggattcggatttctagctgactgcgggttactttttttcacgcccacgctctttggttataaaactaactttataaaaatggctgactgagcagaacattatcaccacaaccccttttaatggtaaaagactcagtcagccattgtttctcttcacacgttctcttcacacataaaaatcatttattttgtgtttgaatagcacttttgattctgtactcgtctatttcagcatctagtttgcaatatcttcatcagtgaaacttactggaagtatgattactggttcagttatcatttacttttccttcacatataaaaatttagcttattgttataaatgatattaggctaagcctaatctttagtcaataggctatgcctaataaattaaatgaaattagacgatgattattttttatatcaaaatcaattgagtagataattaggaaaggcctagcttaacaagtttccatcagaccaaatgagtttaagctggacgctttgaggattttttattgcttttattgttatttaaccattcagaggcttgtcgttctaaagttataatgtatgccctagtatcactattaacccaagaaggttcttttgtattattttgcagcaaaagatattttattatttcttttctttctgccgaagctgacatataagcatgaataaggctattaagttgatgttcatcatgtgtacatcttgattcagctttatttactgggaggtgaaactcctttaagccccaatgttcaggtccaacaacatcagaaaaataactccataattcaggtagcttatcttttgaaatggagcctttttttatccaatcataaatagatggtagctttacattgaaatgtcgagcaatctcagtttttgatttaactgatcctgatgatagttttttattaattgcctgctctatcgctcggcctaaatctttaccattaagcatagcctaattatcttatctttatattgtgtaggcaattcctattgatttaacattaggcttagcctaacattgtatttcaatataggccggaggtaattgaataatggatcaaataagtgccacaaccgcaataaaaaaagcatgtaattatgtcggtgggcagtctgaaatggctaaacgcttgggtatttcaccgcctacagtaaatcaatggatcaatggaactcgaaaaattccagcacgacgttgccctgaaatagaaaaagtaacttcaggagtggttcgatgtgaagaactaaggcctgatgttgattggtcttatttacggggaactcaacaatgatttttatacttactttattgaaataaacaatagcaaaacagtttaaagcagttaactacaagaacttatcaatggtggtaggaaatgaatcactcaataaaattaacgtcgtttaataaaaaccataaggttattgatattggggatcatctctgcagggttcctaataacaggataaatccaatcgttctcataaagctcattgcttttaagagtatcaaaaaagctgtctacggcatggttatagttgttgcattgtcttgtggtcaagtgagggcgcaaggctctgaagtcatcacgagtgatgcggggcatgtctcttttcccgtctttacaatcgtcgaggaatttatcaagaagcaagaacaacggatctgcaatggcattgaattcctttcttttgtctcttctgcgagcgagggaatgaccaagccaagttcccaagaaaaaggaaaaaatagcccaaaagaaagtaataagactgaggctggttttgagaaacgagaccaagtgacccaagaagatatcgagcatgttaagtcatcccttatcggtatgttatttgcgtccttagtgatgatcccactagggataatgtttagcgagtgtattagcccacgaatattagcaaaacgtaagcgctggatgaagcttcatgagctaaaagccaaacggttttaccggaacaacccagggaagtattacgtgatgccacgcaagactttttgccaatggctgtggttttaataaagagaggtatttatgagtaaccaatcaataaaacaagtagtgaaagaaatgtgtgaggcaacagctggtgggcgtgaagcgatggctggtgcgcttggcctgtctttaacatcattcaataacaagctgtatgaaaaaaacggctgtcgttcatttgatttaaacgaactgttagccatgcaagatatttctaaaactgttctgtttgctgaattcattgctcgtgagtctggaatgttgctggtggaacgtattaaacccgacgagatagatgaacctgagttatttcgtctacacaacaaagttggttcaaaacaaggcgaactggcaatttttttagaaaaaagtttagaggatggcgttgttgatagtgaagaagagaaacaacttaacgtaatgctagatcgcgtaatagcaagtggtcgtgcatttgttaatgcatttatctcattacatcggaagaaaaaataatgatgggctttagaaagggtgaagccaacgatgtacggtcgctggcttcggtttgcaaatttcaattgtgtgaagagaaattagcatgagtagattatcaaacttagcatgtcgcacgcaagtgcgagcttcaatacgtgatggccgttttgtctatgaaattaaagtaccaaatggctaccaagaaaccaactaccaatttatgcgttggctggtagatgattttaattcaaagaatgggctgaggacgaggcaatgaacaatgagaacccaaaccaacttgatcgctactataaaaatcaccgaggtatcgttgttcatgttgttcgttatgacagagaaaaacagcgcgttatttttatgcttgatggttgtgacgacccacagtgtgaacctgtacagcgttttaaagagaagtacacacgtattaagtaatgaggtggcaagatgagtttattattactaaaaagtcgccctttagtcgttattcctgaattagcggtacgtcttggtttaaatgaggcgatgctgttacagcaaattcaatattggctaactgaaactacttcaggtgttgaatatgacggctcacgctggatttataacacagttgaagagtggaagaatcaatttccttttttctctgaatcaacgattaaacgtgcttttactaatttgaaaaagcagggtgttttacgcattgagcaaatcaataaatcgaaccatgaccgtactaattattatgcgattaactacgatcaccatctgctaactgatggggtcaatatgacccaatcgaacagtgataatacatctaatcgagcagttcaaaatgaccttatcgataagcgcaaattgaaaccgtcaaacagttcaaaatgcactgttctgaacgggtcaaaatggcctgatcttacagagaatacaacagagattacttcagagagtacaacagaaacagatcattcgtcgcagaattctgacgaatccagcgaccagccgaaaaatgattttttaactcgttatcctgaagcagtgatttacagcgctaacttccaaaaatggggcgatgaaggtgatttaaaaacggcgaaatggatgtttggtcgtgttaaaaaactaaatccatctgcgctagagcctacttggtatgactgggcgaacgatattcgtttgatgcgtcaaatcgatgggcgtacccatgagcaaatttgtgccttgttcgattgggccaacaaagactcattctggtaccaaaacattttaagtcctcgtaagttacgtaaacactttgatgaactattcgttcgtagtcaaaagccaaaggatgagctaaaggttcaagttgacaccgttgaacgtgatagtgccttttcccgcttgattggctctcggtctaaacctaaaaaccgcattgaagaaattgcacttgagctagcaggtaaaacaggcattcgtcgtatgagtgagttttcaggtcgccaagcatggagcagcatttggaagcaagcgatagaaatgttacaggagactcagtaatgctaactaaatacattttgttcgttggtttttggtttgtagtgacattattggggttatggggtacttatgcctgagttgatgttaatggatattgtgaaggagagaataatctgcccatttaatcacgtgatgtacggtcacgagtaaaacgtggagagaaatagcatgatgcaaaaaataatggaagtttcagtattacccataatgaatcgtgaattaactatgtcgagtcgagagattgccagtttaacgggaagtaatcattccgatgttaagcgttctgccgataggctttttgttgctcaaattttaacccagccattggctgagttcccttttgaacataacggcaatcaatatactgaatatcgttttaataaaagagactctctggtgttggtagctcgattgtcacctcagttcacagcaaaaatagttgatcgctggcaggaattagaatcaaaaatgcagccagtcattcctcaaacattaccagaagcattgcgattagcagcagacttagcagaagaaaaacaaaaattggaaagtgaactggcgattgcgacacctaaggctcagtttgttgataattatgttttatcccatggttctatgacatttcgacaagtgtgtaaattactgcaggcgaaagaaaccgattttcgttgttttttaattgataagaaaattatgtatcgcttgaataatacgtttacgccttatcaaactcatgtcgatcttggtcgctttgagataaaaacgggaacgaaccaaaaaaataaccacgcttttgcacaatcaaggtttactactaaaggtgtgaagtggattgcagggttatgggctgaatataaagttgaggatgagatttaatgaaactactcttaacgccctatattcagtctgaccttggcgttgttttattgaagcctggagcggagttgcttaagcaatttaaaccacattcgcgcgtgattattagcgatgtaccaaaaagtttagataaatggccttctggggcattaacaggaaatgaacagccattattggataacaagggcattgttgattttttgaataataaaaaagttctccaagctatgggaggattgtcatcgatgaatatgtggataggcagaaatatccattgttgtcagattaacgataagcatgacagttatcatcatcatgaattaacaaccacatggcataaagacggtgtgatacggacttgttggtaccatgataatcatattcgccattcatcagctgaatgggttgctgaattggctcataaaaatcgtattgcttggatggtagatactattcgtagtcgtttgagattagatgatagccattcgctgacgatacctgatttttttgcttttgccgtgatgcataaactggttgataaattacctgatgctatattgcgccgtatcttaaattggcctgataaaactaaagatcgtagagtgcatggcggttttcctgaagctgatattgttccaaatgaagtgacagcactatcagcaatgaatgcgcgtttagatgctataaaacccgttattaatgtgactgtcgatcctgaacctccagcctcatttcttcttaaacctaaaatgtgccgttgggagaatacccaatggcttcaatgggtaaaaacacagccatgttgtgtttgcggacaacaagctgatgatccacatcatatcatcggccatggtatgggaggcatgggaacgaaagctcatgacttattcactattccattatgtcgtcaacatcatgatgaattgcatcatgatccgaaattgtgggaagccacttatggcaatcaaatcgaattgttattttcttttttaaaccgttcattaggaatgggggcattggtttaacgtgtatacggcacggggagtattagtatgagagatatgcaggaagttttatcacgttggggtgcgtggtcagctaatgagggaaatagtatcgattactcatcaattgccgcaggttttaaaggattaattccaagttcaagacgaagccgagagcaatgttctgatgatgatggcttaaaaataaataaagcggtattacatttaaaggtaaataatagttacttgtttcagttggttattatgtactatgtgaagaattatcctttacgctcaatggcttcaaaacttggcatttctcataatgaagtggctaagcgattgcagacagcagaaggatttattgaggggtgtctatcggttgataacgtaaaattagatatggataaaataattagaaaacacagcatttatagtcttgtgtaattacaaaacacaatatattgtgttaataatgattttgatgttacatgacttatctattaaaaacctcgtgagtatagcggggttgtgttttttataggtctacttaagctgacttaccgctaaaaaataaagtttgctatctgaatttttctatggcttaatagcgtcactggtttggaagtacagacctatttatgttagtcagtttaaagttgttcccgtttagcgttatcctcgatacctcttcattgtgaattccttctaattaattcccataagtaaaaatacaaaacaaaccgcctatgccttatggcaaattaaataaattaaaggaaattctatgtctaatacaatgactggtacagtaaaatggtttaacgatgataaaggttttggtttcatcactcctaaagatggaagtaaagatgtatttgtacattactctgcaattcagagtgatgacttcaaatctctgatggaaggccaagaagtttcatttaccatggaaaatggtatgaaaggcccagcagcaggcaacgtggtggctctctaaaggcgctattactattcgcctctattttaaatgcccttgttgtagcggttcacaatatagaacatcacaatttgatgtcacagtgaacaatccacacggcgcaaaatgtatcttttgcaaaagtgtgatgacagcacaaatgagttaagcattaaatagttgaatatacaaaacctcgcttcggcggggttttttgctatctacgatctcatattggttaaagataaaaaatttagattttggggctttaaattgtatagggaggcatagataaaacataactagacttgcctgcttagtttgaactcacaacgaaatgcatactttttcctcataggaaatactgtaagaccgaaaataaaagaggtgttttgctgatattcttactatcagttatgcccaagatataaaatctctcagcttatattgctattaataaatttttcaagaaaattataaagttatatattatgacagaaccttcattaatctcatatccaatcgagtacactatatgtacatacaattgaaaggataaggatttatggccatactcactctccgaaatgttaaaagctattctgctgataaagatgtaaatatagatctaagtaagcctgttacccttatttatggacaaaatggtgcaggaaaatcaacaatttcaagttttttttcaggttttcaacaagaaaaataccagcattgtcattttgcaagtcgtgaaaattttgcttattttgtatttaatcaggaatatatagaacagaagtttcaccaagaaatatatcaacctggtatttttacattgaatgagaagaatgatgacgttaacggtaaaattgaaagtaataagagaagaattactgaaataaacaacttactaaacactttggatacagagataaaaaataaaaatgatgcaaagtctactgttatcgaaaagtactctaaagttatttttaaaaaaactatcaatgatcggcaatcgttagattattttctagatagagctaaacgagtaaataatttttatcaaaaaatgagggaaacttcattaggaattcaaaaatatgagctggtacaacttacagagagactggagttgttacttaatagtgaaggaactcaatatacagagattattgaaccagaggtttatggcctatctgacgaaatgctgactctacttcaaagttcgttgacagcatcgtccgatacaccattttcagccattattcagcagttaggtaacgctgattgggttcatagtggaacaggttatattaaagataatatttgtccattttgtcaacaaaaatttgattctcagcatcttcttcatgaattgacactcatgtttgataaatcttatgaagatgctctggcaacgcttacccacagtcagacagtcatttcccatgaattagacttattggagtcattccatgagcatttacgacaacaccctgtagttagtgatgatcaccaagtttttagtattattaaatctctgcaacaaactttacgtaataatctacaatcactcagacaaaagctactacagccttcgcaatccatacaacctgacgttattacagatatacgtcagcatttgaaccagatactggtaactttaaatagtaacattagagacaataatcagctggcagccaattttagtcaggagcgagctcgcttggcggcagattcctttgcatatcttagagaagtgagtgatccttatttgcgtcaatgtgatcaggaattagcagaaatacaacaacaattgcaagctgagataaatcaagttgatttattgagagatgaagagcgagcactttcggtcgaaactactcatcttatagggcaattatcagttatacagcctacaattgataacattaattataatctgacacaattagggatcaatgatttcaatattatttgtcatgatgagagcttgaaactatatcgcttacatagacaaaaccagccagatgattctgaggtctttaaatctttgagtgaaggcgaaaaaacaatcatatctcttctctatttcctagaatcatgcattggtcacgtacctgatagccagacaatacaacctaaactgattgttattgacgatcctatttccagcctgtcacataactatatttatgaagttgcttcgatgataaaacataaattaattttaccgaagattgcgcaacacattgttatattgacgcataatatatttttctttcaagagattctactttcagtttataaacgactggctcccgaacgtacaacaccaaaggggtgtgcactttatcgcatcattaaaggagaatatagtgattgtatcccattatcgatgcacgacatgctgaatgagtatcaggctttatggcaaaccatacgggatgtccgcgatggaagaagtttaccggtagtattacctaatacaatgcgaaatattcttgagtactatttcagtttttcttgcaaacaggaaaaactggataaagcgctaaataagctagcagttgaatattcagcaggggaatatgactcattttatcgagcaattaaccgtcattcccattctgatggcagaaatatcatggctacaggagtgattaatgtagaaatgtatttccgtttatttcagaaaatttttgaagaaacgaaggattctgatcattacaacacgatgatggggattactgttgagcaaacagaaggttgatgaaattatcacctgcgggcaccacacactcaacggatcgggagcgagcgcatatgcttacgcacatgttctacgcgcccgaaacgaaaacgagtgtaccaacgaactggtacgattttcggtctcatagggctatccttttacaaaccgactactgccggaagtccctgtacccattacaggcatgcaatgatatagagaggattacccgaggtgataaccccttaataatacacagttccataaaataaaccacctttctttgaataatgtagtcattctatgtcttcgtagtgttatacatagttgtaattgtagttgtcctcagaatgaagggttgaagtcagtagaatggcctaaagttattcatcaaaagatagtatgctcaggttgtccttgttgaactaaatacagttttaaatagttttatcttaattcattaatttaattgatataaaagatatataatacaaacaataaaaaaatgccgatacgctaggagtcatatcggcatataaaataaacgcaagaagcaatgtaagtcatgtcgtactaatccgtatcaaacctgtcaatttgatatacctgtaatgataattattatcattaatatattcaaccctaaattaaataaggttactttgtagccttttcatttacaccgaccacagaatcaacatccacttatatcattcacacaagagctgtgagtcggcatcttattgattaaatttttcgttaatttagttgagttttactttaagagagttaggtatggagtatttactttgaagaaggaaatgaaaatctcaatgtgtaatgataagtctcttaaataatagaccccaattatttttggggtcatatattgagattattgaattaatatccctgatattgatttattacgaattaattttcaggtgcaatagcatccaatactcgagcagaataaaccatcgcagcaccagtatttaatgcaacagcaacaccgagtgcttctgcaatttcttcatgactagcacccaactttaaagcggtgtcagcatgtacggcgatacaaccatcacagcgtgttgtgactgcaactgctaatgcgattaattctcttgtttttgcatctaaatgattagtttttttacctgcattggaaagtgcttggtagccagtaaccgtatcaggtgttaattttcctaactcaccaatacgtcccattaattgttttcgatattcattccaattaagcatgatattaaccttattgagttaactgaattattggttgacattatgggatgaaaaaaaagatgatgacatcatcaaacgaatcaatttttagtgaattagtctcatggatacgttgagccaactcttatacctttctcaagggcaattgcaattagatgtgttttgtcaaatgaaaggacatttttccttaccgcatgtttcatctgttgaacatgaaactatttttcacttagttctatcagggcagtgttatgttcagattgaaaaatcagcccctatagttttatccgaaggcacttttttaatgttaaacagaaggcaatcacataccctttggagtggagaacgagatatagaacctcccccttttttgcataaaaataatggcttcttacctgttaagtacacaaaatctgaagatcagactcaacatgttgatttgctttgcgggcgaatggcttatgctaaaggaagcgggttactattattaaatgggtttcctgatatggtagtggcaaatttggtggaaatgccagggctaacagtattgaatttatttagccagttgcttcgagaggaagccattaatgcaaatcaaggggcggctgcgatactaaatgggcttgctcagactttattcgcttttgcattacgtgtttatgggcaaaaaccagatataaactcaagttggttagcattattagctgaacctcggttaagtcgtgtatttaattctatgttaaatgaaccacaaaaagggtggacacttgattctttagctaatgtcgcttcaatgtcacgagcgacttttgtgcgtcaatttaaagcaacggcgaatacgacacctggcgaagttctacaatccattcgtatgctaaaagcactttcattattacaacaaaataaatatacattatcagatatcgcagaaagagtcggataccaatctgaagctgcatttagtaaagcatttaaaagtgtatttaattgcagaccagggcagtggaagaagcaacagagtaaagtgtaaaaatttgcacagagtaaagaagaattattactttcttttgaagtcacttcggtgacttttttgttatctaaagtaaaaacgaaattatatttgcgcttaaattaatcgctgagtaagggaattgagaagcagaagaagttcactattacttaagtgacgggaatgctgttcgagttatcattcccgatttgagtaaaaaaaagccgacgcgctaggagtcatgtcggcataaatcttcgggaaaagtgttaataacgagagcgatcattaactataaagcaatgtatcaatatcggagaaaaaaaaggcacatttacgaataataatcattatcatttaattgtcaattatatgaggtcactacagtgacctttttcttgtctaaatatgatatatatcaataaaaggtgtgtgttatgtcaaaagagataagcgaattacagtttagtcttcactatgcctcagaaacagacagtgaaaagaatacctccgccattttaacggcgaatatccatacgactgatggtgaaactcaacaactgacacaattaatttgcacgacatcttccgcaggtaaaaagcaatatcgaatcggcttgcaaaaaattagtgatgctggtgctccattgctggtggcgattgaatcttattggcgtaaaaacacacaagagagttgtatttattttttagagaaagcaaaacagtttattcaaggacacttacaacaaacgaatacatggatatccatgtacggccttgtgattgtttctaatgcgtcactggaagaacagttgcctgaagatttattaaaagcacttaaagtatcaatacccgcctaattttttaactttctcacactaatcattaacggacactcctcagggggtgactatgcgtatggaaaaattaaccaatgtaacttatggaacagcaggcctaacggccttttttgccagtctctctttatatgaatgggtatttgttatcgggatggcgttcagcatgcttctgggtttagccacttattttatgactcgtcgagaacaacgaaaacgcactcaattatttgaagagcttgttcgtcatgttgacccacaaaacccgaccgaaaccttaaaaaagcttgctgaattaatggtgaaagcgccaaaggatatttaatgtctctcaaacagaaaatagcggcgctaacaacagcaggagcaacagccatcgcgttagtagtaatagcccattttgaaggtgtacgttatgaaccttatcgtgatgtggcaggtgttctaactgtttgttatggacatacaggcaaagacattattcaaggcaagagatacacacaacaagaatgtgatgcgttattacaaatcgattttattaagacacaacagcaagtcgatgcattaatcaaagtatcactcgatgactacaccaaagctgctttatattcctttgcttttaatgtgggtacaaccgcatttgctcgctcaacattactcaagaagctaaacgctggtgatagagcgggtgcctgtgaagaaatgaaacgttggatatatgcaggcggaaaggtctggcgagggcttgtcagtcgtcgagaagcggagtcagcactatgtcatggaaacctttaatcatcattatcagctttatccttgcattactcattacagtcgctggtggcatttatctcttgattgataactcatgtactaaagaccaagtgagtttagaaaagcgctgtcagatagctctctcacatcatcggtactaatcatgaaatacgggaaactctatgccgttattacgatggtaggcatcattgtgggaggctattgggtggttaattggcaagctaataggattaattcattgacagatatcaacaaaaaactggccgtagctcttgaagaacagaagtctattaatactgattatcaagcacgcataatgcggttaaaccaactggatattcaatatacgcaggagttagcgaatgccaagaatgaaattagtcgcttgcgtgatattagcgagcgtcatcctgagcgggtgtatatcaaagccgagtgcccaaaaagcaaaaccacttccgccaccagcttggcttatgcaaccaccgcccgacctactgacaccgctatccgaaattattggttactcagagaacgaattgcagagtcagagcaaatgattaaagggttgcaggattatatcaaacaagaatgcatggaataaaaaagcccagcatgggaggctggacaatactaacaatatattgtttcatatgggtatagttagacttattattataactaaagtaaatatatatgctagtttattgtgtttaattatttatttttatttgattaatagacgtaagataaaaaatagccctatgatttaatgttcatagggcggttaaaatgaagcaaaaagtaaatatcaatcatttccaattatataattattatttctttatgcaatagaatatattgtatttctgttatattagtagattaaaaaatatatttaattgtaatatgtcatatagtatctatttgatgtaagtgtctctttagaggtagatagtattccactctatctgaactcccgatggaataaataacgatgtgtaatcaaaagttagtcgtacttttactcgctgatggatcatgtaaacaagttgatatcacggacatgtactaatgacatgagcataaatactccagatatctatttagataatagtgactgctcgtcatttgtactgggttaggggggcagtagattttgatgaaaaaaaactgtaagagagattacagggctgaaaaacataaatatatttatatatctttttgaaacagaaagcgccgcattgtcgctgtctcctatgttagctatgacctgttttattctcgacagagagcacatagtgagaatcaaaaacaacgaataccaccgttttgttattttcggtcattatcagcaacgtcagctgtaggtagaagaaggggcgtgacgatggagagacatcatctacaaacgtcattcattgattggtgtatacagatagccatcagttaaccactggtggcttttttattgcggaaaatttgtaatggaataaaaaaaatgaaaaaacgcaatgtctatggtggtcgctgggcaaaggtgcgattagcatttcttaatgaacatccactttgcgtcatgtgccaagagcaagggcgcattactgcggccacagtagttgaccacattattccgcatcgtcttaaagaagcgcttgaatcaggtgataaagaacgtatcgcaaaagcccaagccttattctgggacacaaagaacttccaaagcttgtgcgaattgcatcataactccaccaaacaacgtatcgaaaagagtggcaaagtcattggctgtaatgcggatggcattccacttgatcccaattctcattggcatcaataacaccatgaaatacagggtgggggcggggtaaaagttcaaacactttcgccctgattacctagcgccctcatttgtgtgcacaatcgcgaaatgaaaagtttttttctgggaggttccgatggcaggaagacgcccgaaaccgacccacttgaaggtggtcaccggtaatccgggaaaacgaaaactcaacgataaagaaccccaacccaaacgtgaaattccaagcccacccgaacatttaacggattgggggaaaatggcgtgggcaaaattaaccttattactcgatggaatgggcgttttaaccgtggctgacacgctggcattagaacggctgtgtgatatctacgccgatattcttcaattgcgagacaccattgcgattgaaggtcggacatacaccacaaaaacgcaattaggggattttttaattaaagcgaatcctgccgttgccatgttggctgatgcagatcgccgttttaaaagttatttagtcgagtttggtttaacccccgccgctcgttcgaaggtgaagatggatggtggagaagaagaggaagatccgctcaaccaatatttcggttgatcccgcaacacaatacgcgcaagacgtgcatcaaggcaaaatcttagcggggcctgatattcgtcatgcatgtgcacgtcatctcaaagatttaaacgaagccgagcaacgaggattagtctgggatgtcgaggctgtcaaaagggtgatcgattttttcgcgaaagtcttaaagctcaatggcggggaacatgaaggcaaaccgtttattttattgccttggcaatgctttgtgattggctccatttttggctggaaaatgactgatggtacacggcgatttcgcattgtgtacgttgaatcaggtaaaggttcaggaaaatcaccgatggcgggtggcgttgggttgtattgtttagtcgccgacagtgaaccgcgtgctgaagtgtatgcggcagccacgaaaaaagaccaagccatggttttgtttcgtgatgcggtggcaatggttgatcaatctcccgcattaagtcagcggatcaccaaatcaggcggaacaggcaaagagtggaacttggcttatttgaaaacgagttcattctttcgtccgattagttcggatgatgggcaatcagggcctcgtccccattgtgcgttgattgatgaaattcatgagcacaaaaataataccgccgtcgagatgatgcgagcgggtacaaaaggtcggcggcaagccttgatatttatgatcaccaacagtggccatgataaaaccagtgtgtgttatgactatcatgaatacggacgaaaagtcgccgaaggaactatcgaagacgacagtttcttttcctatatttgctcactggatgaaggcgatgatccctttaaggatgagtcttgctgggggaaagccaatccatcactgggctacaccttttctgatcgctatttgcgcgagcaagtgacacaagctcgaggtatgcccgcgaaagaaagcattgtgcgtcggcttaatttttgtcagtgggtggatgccgataatccgtggattaacagtgaaacatggatgcagtgtgaaaacacgttcacattcgatgaccttcaaggtgaagagtgttatggcggactggacttatcgggaaccaaagatttaaccgcattagccttgtattttcctagtctcaaacgtctttatgtcgaattttggacacccaaagacactttattggatagagcgaaaaccgaccgagtgccttacgacttatgggtaaggcaaggttttatgcataccacgccagggaatgcggtgagatatgaatttgtggcagaacgcattgctgaaatggcgatgcacgtcagcatgagagccattgcctttgacccttatcgcattaaataccttgaacccaaactcgatgacgcgggtgtgacggttcctttaactccgcatggacaaggatattacaaagccaaagattcagggctgtggatgccacactctatcgaactgtttgaacagctcattgatgacaagaagattgagatccacaccaatccttgtttgagatggaatgctgcatccgctgtgcttgaggctgaccaaaaagataaccgcgtctttgccaagaaaaaaagcaccggtcgaatcgatggtgtggtggcctctgcaatggcgattggtgctgcggaaggtgaggttgataatggcaaccttgatgattttttctctaacccattgagtatgtgatgacagataaacaatattcaatcgatttgcgcactaatcatggttggtttgcgcgtctggcttccttcttcgttgggggaagactcgtgacacctgaacaaggttcacaatcaggcgttatctcagcgcaaggctcacttggtgattcttctgtaaatgatgagcgaatactccaaatatcaacggtttggcgttgtgttagcttaatttcgacgttaacggcttgtttgccactggatgtgttcgaaacggataaacagggaaatagaaccaaagtcgatttaagtcacccattggctcgattactgcgatattcgcccaatcaatatatgaccgctcaagaattccgagaggcaatgactatgcagctttgcttttatggtaatgctttcgcgttgattgagcgaaataaagtcggtgatgtgatcagcttgctccctctgctgtctgccaatatggatgtacgcatggaggggaagaatattatctataaatatcagcgtgatcatgaatttgcgaaatttaaacaacacgaaatttttcatttaaaagggtttggttttaatgggttagttggattgtcgcctattgcttatgcgtgtaagacagcaagcacggccgttgcgatggaagatcaacaacgtgagttttatgccaatggggctaagtcacctaaaattctaacaacaggcgataaggtactgaataaagagcaacgtagccaacttgaagagaatttcaaagaaattgcgggtggccccgttaaaaaacgattgtggatcttagaagggggatttcaagctcaagatattggtgttagtcctcaagatgcagaaacgatgtcttcccgcaaatttcaagtcagtgaattagcccgtttctttggtgttccaccgcacttagtcggcgatgttgaaaaatcaacaagttggggaacaggtattgagcaacaaaacttaggttttcttcaatataccttacaaccctatatctcccgatgggaaaattgcattgcgcgttggcttctaaaaccccccgaagtggggaaataccatgctgaacataaccttgatggattattgcgaggcgattccacttcacgcgccgcgtttatgaaagcgatgggagaatcggggctaagaactattaatgaaatgcgacggctcgataattatcctcctcttgaaggtggagatgtcgcttaccggcaagcacaatatttaccgattaaccaactcaataaagagcctcacgaaagtggggcttaattatttatgggggttcaatgcctgatatcagaaaaacactgaattttgatgaagcggaaatcaaatttacgggtgatggcacacaaggcgttttcgaaggttatgcctctgtatttagtcatcaagattccgatggtgacattattttacccggtgcgtttaagcatgttttagataagcaaaaacaaaaagtcgctatgttttataaccatcgagtctgggaacttcctgtggggaaatgggagtacatggaggaagatcaaaaaggattacgtgtaagaggacaactaacacccggtcatagtgcggctcaagatctaaaagcggcaatgaagcatggcacggttgacgggctttctatcggattcggttgtctgcgtaatgattttgagcggacaccttcaggccgtatttttaaaaatatctctctgttacgtgaaatcagtatttgtacatttcccgctaatgaccaagcacaggtttcatcactcaagagcatcgatgggttattaacgatccgagatattgaggattggctgagagagtcagccggtttatcaaaatcagaagcagtcggttttatttcccgcttcaaatccgctattcggagtgagtccgatgacactcaacaatccctagtcgcatccattgttaaccaaattaatgcatttaatctgaaaggatagaatatgtctgacttagctattatccaagaagccatcgaaggatcacaaaaaaaggtgcaagagctcttcgatgcacagaagaaagaaattgaagctactggcgtagtttcaaagcaattacaaacagatttagccttagtccaagaggaattaaaaaaagccggtgaacgtctgtttgatttagagcagaaaggggcaacgagtgctgatgatcctaatgcgaaaaaagatttttctgaacgagcagcagaagcgctgacaaaatcatggaatgggagtcaggcttcttatgaagtgaaaacttttaataaatcattaggcagtgatgcgagttcagccggtgttctcattcagccgatgcaagtaccgggtattattatgccgggtatgcgtcgtttagttatccgcgatttattagcacaaggtcgtatttccagtaactcactggaatatgtacgcgaaaaattgtttaccaatagcgcggcacccgtgaaagaaaaggcacagaaaccagaatctaatctgacttttgaaaaacaaacggcaaatgtgatcactattgctcattggatccaagcgtctcgccaagtgatggatgatgcagtgcagttacagtcttacgttaataatcgcttattgtatggcttagcattagtggaagaggagcaattactcaatggtgatggtacagcggataatttgacggggattaatcatgttgccactgcctatgataccacgttgagtgctactggcgacacgcatgctgacttgattgctcatgccatttatcaggtaacagaatctgaatttagtgcctctggtattattttaaatcctcgtgattggcatgccattgcgttaatgaaagataaagaagggcgttatattttcggtggcccacaagcgtttacttcaaatgtaatgtggggattacctgttgttcccacaaaagcacaaaaacaaggtgagtttactgttggtgcatttgatttggcgtctcaagtatgggatcgaatgaatgcggttatcgaagtgagtcgagaagatcgtgataactttgtgaagaatatgctgaccattttgtgtgaagaacgtttagccttagctcattatcgccctcaagccttaattaaagggactttcccaacgtctggaagaagtgcttaagtaataggtcggggtaggtaactatcccgtattacatcatgaatatcttagatgtcattcctctttctttattaaaacagcatctcgaatacagcggtgatgatcgtgatgagcagattatattttatgcacaaagcgcattaaattattgtttgagatggtgtgatgaaccagcatggaaatcacccgatgatatcccttatgaagtgaaatcggcaatgctcttagtgctgggggatatgtttgaacatcgaaccagccaaagtgaaattccgttatatgaaaataaagcagtagaacgattgttactgctttgtcgaaattggcgaggtagttaatggatccgggacgattacgccacactattcatattcaaaaatcagtattagcgcccgatgccatcagtggcaatgatgtgatttggacggatcatgcgacaaaagtacgtgcagcgatcatgccttatcaagggcgggaatattttcaagcccagcaagtacaaagtgaggccacaacgcgaattattattcgctatatcgctgacattgatacttcgatgcgtattgtatggggtaagcgaatatttaatattatttcgattattgacccttatgagcgtcatcgtgagcttcaattgatgtgcaaagagggcgtgaatgatgggtgagattaaaatcagtggattgtctgaactcgctcaacgaatgcaagacattgcccgtaaaaccagaaatcaaagtgcgcgtaaggcgatgaatgcaggcgcttcggcgttaaagcaggaaatcaaacatcgagtgcctattcttaaggaaacggtgcctcatcgacgcaaaggcactatcaagcgcaatattcgttctaaaacgaaagtacaacgcaatgggcaagtcaaaacgcgcatttgggtgaaatcattatcgggtaaaaaggtgtctgcctttaaacaggcaacggggaaaagtgcagcattgaacccgaatgatccgttttattggtggtttgttgagtttggcaccgccaagatgcccgcacaaccgtttatgcgccccagctttgaagcgaaaaaggaagcgacggctaaagtgatagttcaaacactcaaagaggacattgaaaaagcaaggtagagatcatgatacagcaattaaaagagaccctttcaccgctggtcgatggaagggttttttttcaggtattacccgaaggcaaagggcattatcccgccattgtgatccagtttgccagcatcacgcctaacagtgcgctggaggatacggatttagataactatcgcgtacaactcgatgtgtatgcgctccagccacaaccccttatggtcttgcgtaaaaaaatcgaggctcagattgttgcggaaattccattcgcacaacgggtgaatgcggtctttgggtatgaagcggatgtcaaattgcatcggcttgttcttgaattaatgatttcatcagataaataaggaatggatatgacaaagccaaagaatcataaagcgacgcctttcctcggcacgaagatctttgtgcaaacaggcttaggagaggcgatgaccgtgacggaagcgacgttatcacccgcaaccattaccatcgccaataataaactgaaagcggatgacatgattatgttatcgggtttaggggagttagatgggcgttttcctattgcacaggttgatggcaataaagtgaccttgtgtgaggaagtggattggggtgataaaacgttaccctcagattttgcaaacgccaaagcacaacgcattcaatggtctaataatttctgtgcggtaaaaagtttcagcaaagacggttcgacaaccgaacaaattgatgtcaccactatttgcagtgatggcaaagaatatgaatccggtgatacggaatacggctcaattaaattgaccttcttcttacgttatagctccagtgatgtgcagcgactcttgcgtaaatatgaaaacagcaaagaaaaattcgcagtgaaaatggtcttaacgcgagatgaaggctccatgttttattacggctccgtcgaaacaggcatgaacattgatggcagtgtggggcaaatgatggattcggggatctcgattaaattgtctggccgtgattatttgaatgcgaagaaataacacttaactcacctctcttattatttctcttctcccttctcgataaaaaatcttaggagtgattatgtctaacgcgttattgcgtgaattagtgttaaaccaagcactgaaagtgacaccttttacttatttagacaacaccttttacgtcaaagagctggatgttggcaccatgaattacattcagcgcaaacttcgccaaattaaaatcaagcttgctgaggcgcaggacatttatttagacgaagacgatcccgaacaatttaatgaggcgataaatcgtgtctacgatgaatacgatgtcgccagaatgttggcctttaagttgtgtgatgaaaaaggagaactgctttttgatgctgaaaatgaagcagatttaaaaggtcttaatcgtctagggcaagggttctctaatgcggtgtttacagccgaagcggggaacagcgaaaaaaactcggagaccgacggcaattccaactgatattgtcgttggcattgggaaaaacgctcgcggaaatcgagcaaatgcccgaaagccacttgtgtgaatatgaagctttttatcgcaaacaaccctttggtttatggcgagaggattatcggatggcacaagtggcgcatcttcttgcgatgataaatcgtgatccgaaaacgtctccgccggaattgatggattttatgccgatgtggaagaagaaaatcacggaagaggaggtgtgggataatgtcactgagagtgtattagctaatcgatagccccacatctgtggggcttaatcgttaaccaccgcgagacattttctcaatttttttatccgtattgtattgagaaagggcataaaccgaccagatagccgcagggatccatccaattaaggtgatttgtaggataaggcagaagatgccagcaaatgggcgaccaatcgtgaaaaattgtaaccaaggtagtaataacgccagaataagtctcataaaaccccctctattattcgaaatttcagtttgtcaataattaaatcaatagcaaataacaaggaatattgcatttattcagggtgaaagtttgcttttgtagtgttcataccaaggattgaatttatggcgggagcattaggtagattaaatattgatttgacgttgaatacggcaaatttcacaaatgcgatcaaccgtagccagcgccaaacagaacaatttgggcaaagtattcgcgtcagccttcaagctatcaccgtgcaacaagagcgaatggtatcgcaaaccgcaaaatcctcggcgctttttgcccgttttgcgagtgtcaccgcaagtgcattatccattcatcaagtcattaattatgctgatagttggacggaattacagaaccgcttaaaactggtgacagaaagttctgtcgagttaaataaagccacacaagcggtctatgatattgcccaaaaaacctatcaatcattggatgccacagcacaggtttatcaacgttttgcagataatgccgatcgcttaggcttaagtcagcaaaaagtggccgaactcacggaaactgtctcaaaagccgtggcgatttcaggcgcgagtgcaaccgcagcccaagcggcattaacccaatttggtcaagcattagcctcggggcagttacgtggcgaagagctaaattcagtgatggagcaaacccctgcgttagcgaaagccatcgctgacggaatgggtgccagtgtgggcgaattaaggaagaaagcccaagacggtgaaatgacgattgagaaagtcattcaagccttagaacgtgcagctgacagtgtggataaaaaatttgctaccagcgtgacaacggttagccaaggtttcaccaatcttcaatcggcgatgacaaaatttattggtgaagcgaatcaaggtactggtgcgactcagcttttaaccatagggatggctactcttgccgataatctatcgttagtggctaaagtggttgaaggaattgctgtcacggcattggtagcaaaactctctcaatggacgaaagctacttatctgaaaaatcaggcaacattgaatgaggccaaagccacattacagagtgcggaggcaaacagtgtggcagcaaccagtgccgtgaggaaggcatgggcggataaagaagctgctacatcggcactcaatagagccaaaatggaatatcaagttgctagaggcactaatgctgaaaaaatcgcactcgataaccttatcgccacaaaatcactcgcaagaacagcctctctaaattatacacaagcattaaccgccgaaaacgtcgctcaacgtgcattaacgaccgctcggcgtcaatcaacagtggcagggcgagcacttaacagtgttatgggattcgcgggtggccctattggattagtgttgacgggtgttgcggcattgggcatgggattgtatgagtacagcgaaaatgtcaaacaagccaagttagaatcgattgaatttgctaattcccttgatacatcaacagaagcgttaaacaaaatgagcaatgccacgttagtggcgaatttaagcaaagtttcatcgggtattaacgcgcaattggagaaagtcgaggagcttaaacaacaggtcatttccttacaaggtctatcaaaatacagcgttgagagtgaaaaggcgtttgctgaacaaggtgtgggggatttataccttaaacgagtggctgaaaagcaaaaagagcttgatgctgcgatggggatatatgccgagcaagttaataacttagagcgtcagcgagccaatatgcaaaatatgttggcgacactcaaagaaaaagtaggtgatcaagcccctgaatatagacgttatgccactgagttacaaaatgttgatgccgttatcaattcacttaaggcgagcttaaagagcttaggcattgaatatgaatcactcattaatatcacgcttcaggcgacaaatagccaagtgaatgccgccacggcgattgctaaacagattgatgaatcgattgaaaaatcgcaacgttcagtggcaaaagcacaagccacagggaaggcattagcgaaattaaatgcagaagatgtattggcctcacgcaaaattacaccagatatgcaaggctacgataaagccttacaagcggaaattgaggcacaactggcattgcaagccaaacggacgtataagcccagccacaaatcaaccattgattatgccaagcaatacaccaaaatcttaacggaattagaggaaaaacaagcctcactgattgcagatggacaaagtattcagctgtatggcactacctcttcctttaatgaatacacatccgcattagccgatatcaaacagaataaaaacaagtttgatgccatcttaaaaatcgatcccaaagcgattgagacgataaaagaaaaagcgaaagccattgatgatctagcgcgtgccaactcggttgcgcaatttgcttatgatcgcggtaaagaaattgagcagatgcaatttgaaaccaccttgataggaaagtcacgcgcagagcaagaaaggcttaatgcccttcgtcagattgatgtgctgtatcagcaagccagtgtggatttaggcgaaaaagagttggcgaacttacaacgcaatgtcgaactcactaaacagcagattgaggaagaactgaggaagcgagaggccatgaaaggtgatccgatggcgggattaaaacaaggcttatcggatttcagtgagtcggccatgaatgtgatggagaacgtcagaaacgtcactaccaatgcccttaataatatgtctgatgcattagccgattttgctttaacgggtaaaggaagctttaaagattttgccaatgcggtgatctccgatatcactcgaatggtgatgaaaatgttggttttcaaagccattgaagcaggcgggcaggcaatgggttttgatatgggatggatgagcaaagggcatgcttacggtggttatacggggcatggaggaaaatttgagcctaaaggaattgtgcacggtggtgagtttgtttttaccaaagaagcgacggctaaattaggtgtcggtaatctctatcgcttaatgcatgctgcgcaaggttatgcttcggggggctttgtgggggcagtcgcaggacgaatacccattacaccccaaccgacgttagctcgtgcaggcggtgtgcaaatgacggtcgtgaatcatattacggtgacgggaaatggtgacgctgtacttgcgcaggcaatgaaggaagccgcacaacaagggacagaagcaggcgcacagaaagctcacgcgatgatgttacaagactttcaaagtaatggcgcagcacgcagaacattaggagtttaaatgtctattcttgaatggccaaaagcggtgatccccacacaggaaaactggcaattattgagtaacagcaaaacctttacctcgccatttaatggaagtagccagacggtgcgctttccgggaagtcgttggcgttgtgagctgacatttaataatttaaatgaagagaaatcgcgccagttagaagcgctggtggcttcattggatgggatgtcggggcgagtcaaaatagccagttggataagaaaagggcgttatgggtatggttcgcctcgtattgcaataccaagccaattaggtcatcggctagaaacaaaggactggaagcgcaatatgcgcgtgttacagcaaggggatcgtttaactgtgggcaatgaactcaaaatggtggtggctgatgtggtcagtgataatcaggggtatgccagtatccctatttcaccgatgttaagaacgtcacctaccgtcaatgaaatgctcgaggttgagcgtccttttggagtttttcggcttgttgataatgaacagggtaaatttcagcatcgtcgcttggggtatacccatatcacgttattttttgaggaggtgttgtactaatgcaatatcatccattttctgacgccatggtcaatgcgattaatgagggggcttatatcgttttagccgccagactcgatttgaaatcaggcgtcacctgtgcgcataccggtgttgggcaactgattattgcaggggaaacttatttaggcgtaggaagtttaggcgaaatcagtcagctaaaagaaaataagacaaccagccctccgcaattacagcttaaattagccggttttgataaatcgctggtgggaatggtgatgaatgagcaaagtcgaggacgagaagttcgattgatgatggtcgccatcggtgaagagggaaaaccgcttcttgctgaagtcttatttgtcggacaaatcacatctatcaatgtggtgtctggcgaagaaaatgccgtatgtgttaatgtttctaatcgattcgagcgatggtcaatcgggttacccgatagattcaccgatgagtcgtggtcatctcgaagacaaggtgatcgtatctttcgttatgttgctcaaatggctgaacgggcaatttattggggcagcaagaaagatgcacctgcatttatttataaataatcttattgtcttgttaaacccacttttgtgggttttttgctatttaaggtcagtacatgaaacaacccaactggacacttaaattacctgaaaccataagggcggcgatgagtcgccctttttcatggggtgaatttgattgttgtatttttgcctcggaatgtatttacgcacaatgcggtttctctccaataaggccttatctcaatcactataaaaccaaagccgaagccttcaacctgctcaaatccaaatttggctccttagagaaagccgtatcacgctatttcaagtccattgagattgagcgggttcagcgtggtgacctcgtactgttcaaaggtgaggacggtgacagtttagccgtggtctgggcggggcattattggggcgtaaccctacaaggtgtgaagccagtgcagattaacccaatcaaagcgtggagagtggaataatggggggaagtggtggattaatttcaaaagtcgtgggtgcaggcttaatgattgctgggctatttaccggaggcgtcacctcggcgatgggtatggcactgatggcagcaggcgttgcggttcaagtcgcgggttcgcttatctttaagcctaaactgccttccatgaattatcgagataccagtgaacgcaaacagatgttacgttcatcgtctgcgcctgaaaccgtaattgtcggaaaaacagtgatatcgggtttgcttttctttgcagaggaagaaaatggcgaacaagatgaaaatgaaaaaatcacactggcattggcgcttgctggacaccccatagagaaaatcgggaagatttggttaggagatgatctcattgagacgtttggtgataaagcctcatgggaattacataacgatagggaaaatgccgatccctttatgcttaaaaattgcccgtcatggaaagaggatatgattggtcgaggtctagcgtggttacgtgtgacactcacgtttgaccaagaaaaattcccttatggattacccaatgtgaaatgtgaagtctggggaaaacatctgtttgatcctcgcactgggcaaactgtgtggagtaacaatggtgccttagtcattttggattattaccgccattatttaaaagtacctgatacggatattgattttgacagctttaaacaggcagccgatttatgtgatgaaaaagtgagtctaccagaaggcggatttgagtcgcgatatacccttaatggcgcctatgacttaaatgagagtccatccagtgttttggaggcgatgcacaaatgcatcaacgcggaaccgacattcaccgcaggaaaacacggtatccaaatcggtgcttattatgggcctgcaataaaaaccatcactgaatcacaattgattggcactgtcacgtgtacccctgaaacaggtttaaaagacgcgaccaatgcggtgtatggcacgtttattgatgccgaacagttgtacacaaaaaccgacttcacgcctgtgattgtggacgaatgggtgaaagaggatggcttagaaattcgagagaatatcgactatcgttttgtcaccagcccttatcaagcccaacgattagctcgccaatatctccgcaaaaagaaagccggaagacgggttcaactcacgatgaacttagacggctatgcttatcgtccgggggaagttgtgcttttagaattaccggctttggggattagtgggcttgaatttcgtattgctgaatggtcttttcatacattagacggtgtggctttaacgttggaagaggatggtgcctatttatatgaagatgtgattggcaaaccgtttgagcgtccgccatttgtgagtttatccactggcggtgttgcttcccctattaatcttacctttgttccacttgcagtcagtgacatcgtacaaggtacactttcttggcagaatgttgctactgatgtgcgctataacaccgtcactattcttcaagaaggcaacgttattcaatctattcaggtaccagctgaacgtgttgatattaacggattagcgcgagggatttatcgtgttgaagttagagcgacaaatgtggccggcgcaatgtcggcacccgctatcagtgactttgccattcaagcaccaccacctcctgagcatattgatgttacttctggcttatttaatctgaccattgcaccgaaacaaggcgatagcgctgtctttggttatacctttgagttttggtttagtgaggaaaaactcgccaatctctctgaaaatgaagtgatcactaaaacaaacaaagttggccaagggaatttctggacgcaagagaatttaaaagcagggcatacgtattatttttatgttcgaacaatcaacagctatggcaaatcactttttgtggaggcttctggtgtttgctcagctcaaaccgatttaattcttgaagaattagcggggcaaatcagccgagaccaactcgcacaagacttattgggtgagataaatagcaaagctgaccaatcagccgttgttgagttaaatacgcaagtgaaagcgaaccatgatgcgattttagcggagcaagttgcacgaggagcagtaattaaccaagagcaacaagctcgcgctgaagctgataaagcggaggctcaacaacgccaattcttagctacacaacttcgtggtgattatacaggcaatgatttatcgaaagtcaccgcaggacttatctccgctgagaagcaagcgcgagttacaggtgaccaagcagaagcgaaagcccgacaatcattggaaacacggatgaatgggaatgtttccgtgattaataaatcattaggaaccctcacctcgaaacagcaagcacaaacacaagagatttcaacgctcaattcaaatcttaaggggaaagctgatagtagtgcggttaatgcgttaaatacgcgggtgtcgaatatcgatggaaaaatgacggctaccgctcagcaagtcactcgcctagaaagccaagtgggttcaagttcagccaaaatcgagcagacctcaaaagtggtcactgatttaaatggcaaaatctccgcatcatggacaatgaaagtccagcaggatagcaaagggaataaagtcattaccggcattggcttagggtttaatgcacaaggaaatagccaatttctggtcaatgcccaaaactttgcggtgatatcgtcattaaacggcaaagtggtgacaccgtttgtcgtgaagaatggacaggtggttattcatgaagccttaatggataaagcgtggatacagaaactagtggtactcgattattttaaatcatcgggatttgataaagggaatggctttttattggatgcaaaaaacaatattttccgctttacgggtggtaatggggcattaaatatcaccaataatcaattggtcgtcaaagatgagaaaaaacgccttgtgatgaaaatcggttacctagggaattgatttatgtatggtcttgaaatttttcctgttgaaggcggtaaaccttaccgtttaacgcgtgatacgcaaattctctgttatttaacctcttatcagatagggccagaagattggccccattatcgacaaccgaaaaaaacacggagcaaagtcatccatgaagccatggggtatgaggcgttcgccatcccgagagtggcttctgtgtatatggcggtgaatgattatgcgtattttcagggaataacgcatatccgaatggaagggcctgtattacgttatgagtatgtttatgacaatgttcaggttcaagacccacagatggccaaaagagccaatatggtggtcgatatttatggtatcccgttaccggatagtacaaaaccaacgtatggtgtggagtggtatggggcctttcagggatttcgaagtgcgattacacgtaatacacaaatgacttattgtgtgtttcgacaaaaaatccaccttgaaggcgggcgctattggtctttgccaacaacattaccgcatttagataagtgtgttatgttttatcatgccaccaaccctcaagcggaagtgagctatttagcgcataaaaagcaattatacagttcagcccaaacagacatttatgtgtgtgttttcgtttcaggaatggttttgaccccgaagagacgttggggtttatcactgtacagtgaagatggaacactggtctttaatacggactatttgccttttacccgaggaaaatcaatggaattgttattacgggaggggagtgtagagactccatatagcttgcctttagtctgtgcaacaagtcagtttgtgaatgcgtcttatcaggatgaccctattgattgggccaagcgtaatacggggatacgttttcggggaaaacagatttttgtgagtgaacggatacgtgatgctcatcggcaacatcatgtagagcaacgtattcccttttatgtcctcaatggctcactttatttttaaatctttctgcattcacattaataatgtgatgaatttcaaatattattacgagtgggactctcagcacggtgaactggaagggtatcgtgccagtgacggccaacatatcgaggcttttgacccgaaaacgggtaagcaattgaagcctgctgatcctaaacgtaatatcaaaaaatgcctgtaactagagataacattatgggattgaaattaagaatttattggttcaataagaaaacaaaggacttttctggtgaggaatattctaaagatctcggtgatgacgatttccttattgaggaaacaattagccctaaaaatgagaatattatcaataatggtgagtttgaactgaaaaaagaatggattaatactattcaaaaacatgtaactcacaaaattgaaccggataaatatacttatttcattgcatttgattaccagtgataactggtaattaaaatttttcaagaatgaaataaaaacgagtacccgttgcttacgaatgagtggcgggtatttattcacaacagtatcgagcatgagatggaagaagtgctgaaagtggaagaggaacgcagacaaaaagaagaggagatgaagtctcaatttgggctgggtgagaatggaaggctgttatgttagatatattataatgaaatgaattttgggtttcattattgtttattttatttacacttttatagtgaaaatattcatatattatatataaatatcattaatatattaccttccccattcttgaaatggggtttctttattatcaataaattctatcaaaatcttcatcattactatcgaaaaaacaatcgatacgttctgatttatttgaaattctatgacactttttcaatgtgtttgcatttctattatgtatattttggtactgaattttttcgctcggggatagttctgaataaataacccgttcttgacatccaatggagaatagtgatgttagtaataataaagaatatttcatgtttttgcttcttttaaattttaataataattcagttaaagatattaatgatatatagtaattgttaatattgtgttttgcaagtttttaaattaaaagtataattgattttattttttacttaccagtacgttgcttacctttatcttacattcttgaacagctttaaataaactattcatgtatttattagcttcatccgatcctcttatgtattcttttgtgtataataaatcttctttttttatatcttttaattgttcttcatataagcaattacacatctcattcgtataaatggcatcacttatgcacctttcgatatagttattattggcataacaattactaattatcatatatgataatatgatgttaatgaaatatgttttcataaattacctttattgtactatgagttataattactgttatcgattatatcatttaagaatggtaacaataaataatatttttttataacggaataagatgttaattcttaacgagggatgtgaatatataaaatattaatgttttttattgtgagtttattttaatattatgttgtgcaaatgggctatagatataggtggggtttattccaatacttttaattaataaattaatggggtgattaattctaatttatatattttaactatataatatatgcgaatacatcgttatgataaatatctcaaaaatatagattatgattttctaataattatttagagtgaataattattagcttcaatataatgctttttattgcctagattctaatgaacagtatagaatactacagatctttaggtgatgaaattttatcaaaccatgtattaagtatttctcgcttttctcgtaagtaatcatatctatcataatgcttttgggaaacaccaggtcttttgtgattttgtaccatattcttaattcagaacttattcccattttcctagctaatgtttcgaatactcactaagtcatgtttacagccctaattagtggttatcaaaaccaataaaagcattatggtaatcaactagttataaaaatgcataatcactgtcttttaagtctattaagagtaaatatgccttaataaacaaatagttaataatggctgatttatataatgctacgccacatgggttggacagaagctgctgacttaatcattaaaggtatggaaggcgcgatcgaagctaagaccgttacttatgatttcgaacgtctaatggacggcgctaaattgctgaaatgtagcgagttcggtgacgcgattattaaacatatgtaatataattagcgttgcgaattgattacgggaacttaagggttcccgttttttattgtcaattttctaacattactttttattttatgtctattatttgcatattttggagatgaaaataataagctggttgttaaattgggctgcttggggtagtcgaattctttttcatgaaaaggtcaataaaatgccatggggattaacaatttataatgataaagaggagggaacataaccagctcattatttgtgctcgattttattaaaattacaggagatggaagcaaataatacactgttcctagtggattaacgttgtatgcaacagcaataggaaggcatagtattcgcacttctgtttcaggcaaataccgtatattggaaatccaatataacctcgccatcgatggatggcattattattgtggggctaaaataaatcagtaaatatggtttgaaagtatttaatggaaaaatgcagagtatttaagcacattaggatcatttgtttttttaaattcattaataatattaaaaaaggaaattataatacaggaataaaagaaagggatgatcctccaatggtttttttcaagatgtacatcaatacaatctattatctctgattcaatttggttataagaaaggatggatattggaacattacatgttaataaaacggtgatatgctttttgagtgttacttattcgtcagagcctcatattataataaagctaaacatcaaaaatgggatattcaaatatttaataataaccagttgcttcaagtctcaggagcaagaccattgagaattcagtccatcacagggttttctgatggtagacctattggtaatgagttgtcggtaggtgttcaatgcgcttcactgtgtcgagttgtcggatattactccacaccaacatctccttatcaacatgccgttattgaagtgggaagttgcggttcaggcactaaaattgtaccaatgcgatggcaattaacggtattaccggggcctagtgcaaattcaagtacggacgatgtggtacagtatattgatattaaggattatcaataaggaatcagttgataaaataatagactaattttccatttaattatatatgagcaatcaattttgactttagttatctaaaaatgataattttatcaggttataattttgttacttatatgattgttttgttgtgtattatttttatttctaaaaatttttatggttgatatagtacttaatatttatattaattgtgttaatataaatattaattttttatatggttgatgaaaaaatgaataaagataatgagtatggagtaatatttaattcttctgattcaatggatgattttgatagattggctaaatacattattatttatccagatagggataattttaatgatttcggtttggatagtaaggtttttataaggattgtaaatgaagaagagaaacttaatgtcaatcttccagggtttattgggttcattaataaagaaaatgatttaaatggtaaatattttctaaaaaatataattaaagatgggaaggttgatttcataaaaaataataaaaaaaatccatattatttttttaccatgctaagagaattaaaatattatagaagtttagttgaaatttttggttcaaaagaggcaaataaaattttgctatctattaatgatatttcattgtcagttagtgatattgcagctaaaaaatatagaaatatagctttagaaacagaaatatttaataaatcatttattagaaattcagaatcatattttacatttaaaaattcatcttttattctaaagggcttaagttatgagaaaggaaatttattatccacaaatataacattatcacctaaaaatgaatcagaaccagtattaagttttgactttgattatcatgatgagttacctaaaagagtttgtgttttgattggtgagaatggagttggaaagagtcaaacattgagaagaatttgtatggctgctatacgtggaaataaagatatctttgaatatgttgataattccaatagaaggatattgattaataggcttttggcgttttctcctacgaatgaaagtaaatctaattttccttcagataaaaatattaaatctaaaatatggtatagacgtttttcattgaatcgggtatctaatagaaaaaacattgctaatactaatgatttgattattcagctagctagaaatgaagaaaatattagagaattaaatcggtttgatatattcaaaaatgctatttctaatttgaatgattataaggaattagcgttacctttaaaagaaaacacagaacaaccgatatatattaaagaactaaataattattatggtgaggagcaaaaattattaaattttcgctccattgatatatctaaagatccagtaagatatatagatggtcaatcatatcctttaagtagtggtgaaatatcatttataagattttgtgcgcaaatatgcacaaatattgagaatggaacattggtgctcttagatgaacctgaaactcatttacatccagcttttataaataagttctttgctatattagatactttattgaccttaacaggttctgctgcaattattgctacccattccgtatattttgtgcgtgaagtttttaaagaacaagttattgttttacgtaaaaatgaaaatggtaacttagagttagaaaaaccaaggctgagtacatttggtgcaaatataggtaatatatcttattttgtatttggtgaaagtgaacctacggatgttctattaagagttaaaaataaaataatagaggacaagatgacatggcctgaagtatataataaatataaagatgatttttctataagcgttttaatgcaattgaggaatgaaatagaaggataattgatatgaataaaattaatagacctaaattttgtgactcaatagcaataactaatctggtatctaatacttcactaggtcaccatggtagtataatgaattgtttaccattattaaaatcggcctacaaagagtatatccgtaaagcaggtatcccggataaaaataattatactgcattaacaaaagcggctggagatgcactaatatattattattcacatccaccaaagagtcataatgaaataaataatattagaaaaaaagatagtaattcattatgtccgatgtgtggttcgatgcatcgaggtacgttagatcatgtcttacctaaaaataattttccagagtttgctattttttctaggaatttagttcctgcttgtaaatgtaattttgttaaaggaaaaacatccacaaatggagctggagcaagaatacttcatccttattatgataaaattttgggtaaaaggcttatttctgcaaaatttgattcattaagtcgtattccaacaatagatataaaaatacttttatctaataaccatcctttatatcagtcagttgtatttcatgttgatgaaatagtcaaaaaaaatgacattttgggatatctttctgaacagtgggagatgttttatttacatcccgaatctgtaataaggggacttactccaagacttacagagccagctaattattttaaattacttaagaaagaattacttcttttggataaaaagcacaaaggtaaaaataattggaattctgtttttgtttcgggtctatatagtaggactatttgtacttgggttttaactgaacttcaatcgtctaatagagatactgacggtattttaatttaaatctattcatatagttagtaaattaagctttaaaaaattatttataagtgaagtaagaaggtttatttttagtaaaccttctttatttggaagttataatgtgtattattgagtaattatcttatttttttagatgactctatatcattttttggatttttgtatagattattcttatatgaatttattgaaaatactctccaaaaccaccctaacccaaactaaaaatcaaccagttacatacaaaccaagatcacataaaaaaagattgtcaccaccaataattataatttatttaataagttacgaaattattatgggtataatgttacgccatatgggttggacagaagccgctgactttatcattaaaggtatggacggcgctaaattgctgaaatgtagcgagtttggtgatgcaattatcaaacatatgtaattgttgaattgataaatagttagcggtagcttattagttcccgttttttattaatgtttttttacaataataaataacatactcatatagagaattgtatttaaatagccaaagttagcaaaagtgaataaatctcaacagacattaagctaaatataaaatatgagtgaataaacaataaggtatttattttggtgaaaaatataacagaaaataatctgcaaatggcatgataaagaagccgaagtttatcaattgcagattatctgatgcttaaaaatataaccaaataaaaattaacaggtaatggttatccactcttttccacgagtattattataacgatcggtttgtaaacgtgtggtatggcctaataaggcttgggtatcaataccttgttttcggtataaacgttcagataaagaacgttgctcatgaaatgttgcaggtgttccttctccccaatcaatatctgttttatttctcgcctttttaaaattagtcgttaacgtatttgcagtaacttgttcgccacgtttagattgtgaagtagttcgatgataatgaactaaataatggcttacaatacgatcacgacatcgttcaataacttctttaagagatacattaatagcttgattacgtaaagaaagtggtattgctacttttgatcctgttttactttgtatgatgtgcaaatgatcatcccaaatatcttgaaaacgcatacgtgagatatcactaactcgctgacccgtcacaatggcaagtagcattgcatttcccatataacgatgttgtttatcggcaatatcataaattttatgccattcatctagagtgagtctttgtcgcctgatccgtgttcttggccttttcgttgctagagcagggttatatccgggaggaacttctccagcatgttgcgcttctttaaaaatatcactaaaaaccgatcttacaacttgagccatgcgcatttggcctattgctttgtattcatcaataatactgactagatcacgagtacctatatttgctaatggatataaagccaatttttgacgcatcagatctataggttttttcttttgtttatatgtagcaagttttatctcaccttgtgataaacgttctttttgaatattccaatagcgatctaaccatgtagaaacagagatagattgatctttcatagtagcaactctatcaccaatgattaaaatttggcgtgttctttgttctgctatacggttattggcttcaagagctatctgtttagcttgtgcttcatcatctcctaatgaatgaaattttcctgaaattgggtgacggtatcgccaatatatctttttcatccttggatgatatattgaatataaattgggtatatcaatattctttttacgaggtcgtccgctcatcttttaatattttccttaatatagggtcatcgaatgttttgatggaaggagtggcaactataccaactaaatcagcatcttctttgactcgccataatcggccctctttccttgcagggggacaaaaataacctaatcgtgcatatttatttaatgttgttagagaaggtgggttacttttatatcgtttatccgaccattcctttaatgttaatactttcataatacatccttgcataataaaaattagttaataagtattaatttacatttaaataaaaaataatgaaatttatttgataactaataaatagcattattttctatcgaatatatatttccttttgcattattaataagagagatgttcgttaatagataattattgtacctgatgtttatattattacaataaccatgtaatgggaagtacatattgagctgaaatgagccagctcaataaactaaaataaagaagattagagagtctgaataatttgtattacataaccaataatttgataatcattagtaaataatattggggtaaaggctgtatttaatgagattaaataaaattgtggtggttcatggataaactttttaataacgatgtcattagtaataatatttttagcgataattatttttccatataactctatcttattcttgaatgatggttcgataataacggttgaacctttagggattgaaggaagtgaataggggtttgtcatagattcgccttggtaaattaacccatatgcttgttcagatacgggtactgttgcacagcaccaatgctgaatatcgcttaatcttaatgtatcgtaacgtgctttccaatcagctgcttgttcaagcgtgataatgggtattttcttaatattcactgtcttgcgagttataattaatgcatctgcttctgatgagtttcccccgtaaagtaaccattcaggagagacttcaaggactttggctaatgcctgtaaattttctccatccggctctgtaactcgtgtttcccactttgtaatagaaactcggcttacacttaacatctttgctagagcttcttgtgttaatgacaattgtaaacggcgttctttaattcttatgtgcattttatttctcatgtaatttatatttccttttttttaggtaaaaagtatttgcgtactctttgtctatttgttaattttaattacccaaacggataacttattaatttaagtgatatgcatataatataaattaattatattaattcgaatgacgatagttttagcattaataaaatgcttactattttagtcatgattaaatttaataaaatagaatattttacaaaacactaacggaattaccatcttttgttattttttcaattaaattatttttaatttaacgctttttggcatttagaaagaataaagagaaaaggagttcagcatatgaaatcattaattataaaatctcgacctcagatagtgataccagaattagctgtcaaaattggattgcatgaagctttagtattgcaacaattgcactattggataacagaaactaagtctggtattgaacatgatgggcgacgatggatttacaatacactatctaattggcaattacagtttccatacttatcagtatcaacgctcaaacgggcatttgctcagttacgtatttctgggttgattgaggtaaaacaactcaataaacatcttcatgatcgtacaaatttttatagtatcaattatcaacataagatcttgcaaatagaagaagatgaaaagagaagcttgactgaaggtaattatgccaataaaacaacaataaaaccgttcgatgagcccaaatcgaaacaatggacaggtgtaacaaatctatctcagagtagttcaaatagagcccttcttacagagagtacaacaaagataactacagagagtaacaataaaagatctcggtcagtttgctcgttttcaagtcctgaacgtccagaaatagaaattatccgttattttaacaaagtgactcactcccattaccgtgagtgtcagacgacgttaggatatatccgtgcaagattagctgatggttttcatttcgaagaattgatattaataatcgattatttaacagctaaatggctcaatgataataagatgcaggactatttaaggcctaaaacattatttcataaaaataattgtactgaatatcttgataaagcgaagaaatggcatttaaaagggaggccagcatatcgaaatgggcaatgtttaaaacccggggaaataccgattgaaattgattatgcagaaagagacagtacgtttaatttactatttagctcagcgtggaagcccaaaacagcacttcaaattctagctaaaaaaatggctttacagcgtggtttagggcatatgcatattcacaaggctaggtctgtttggaaagaaatttggtatcagtcggctcaattaattgctcgttcaacaattacagataagatcgcataaggtagtggtgatatgagagatatacaacaagtattagaacgatggggagcttgggcctcggatgtacaaagtggagtagattattctcatattgcagcaggttttaagggtgttttaccttatcaatcatcttcaaggataagttgttgtgatgatgatggtatgattattgacgctacaatagcgcgattacaacaattgagaagagaagaagaattgaatgcgcttattttacattatatatatcagtgctctaaaagaagcattgcaagacgttggaaggtgagtgaaagccgtgtacgtcagattatacagattgcagaaggttttgtagaaggtggtttggcgatgttagattcaggattagtcatggatcatgaagttgcttgtaataaaaaacaggttaaataaaaaagtattaacgcgctacgcaaattaactgttattctaataaaaataaagatatttttctgggttatatatattgtaaaaatataaccttaagtgattaaatataaaattttatataaattaatatttttattgctaaccttgttaagtaatgcttaattttaaattttctaatttttatgatataaacttatgcagtcatcttaaatgttagagttattatggtacctaaaagattaaaggctgcaagggcaagagttgcattaactcaagaagagttaggtattttagctgggattgatgaagaatcagctaaaattagagtgtgtcaatatgagtctggtacacaccgcccaaactttgaaactatttgccgattttccaaaatattaaaagttccagaaaattatttttatactttaaatgatgaattcgcggaagagttaataaatatttataataataaatataattgctcttaaatattatttagaaagattatacatgttttgttactttgttatataaagtaaagagattacatgaataacttaaacttattatgtgctatttaaaataggaggtaaaatattttataaatacactattgtttttaatataatactaaagtctaattatggttccttttaggttaagatatgcccgtaaaatggcaaaattaactcagacaagattaggtactctggccggaatggatgtagctagtgctcgttcaagaatttcgcaatacgagtctggactacataaaccaagtttcgaagttgtgtgtaaactagccaaaatacttaacttgcctgaatgttatttttataccgttaatgattgtttagcggaagatataatgaaattatatcgtgaaaaatataataagtaataagcttataattcatctttattatttatatttttatgtcttaatttacgaataatttgatttcctttttcatcaaagtaccgttcaggccatattgttgatggaggtatatcaagttctttagcaataatttgttctccttttggccatggacgggacaacgcgttagatagagtcgatgagcttaaacctgcagctctggaaacttctgctagtgttgtcccttttttctttaaagaagcaataatatcagccggatgccagtttttattaatcataagatatccatatagattggtttaaagtatattgatgaaagtaaaatgttaatatatcggttaacatttttcattttaaataattgttatatttttttaaatgaagtaattcctatttttaaatgtaaccggttagtatttccatttataaaatatattaaatatataaattaatatttttatttttacaattatcagcagggttatttatttaaaaataatctgacaaaaaagacttgctgtttatatgatgacgagttacacctttatatatattcatatttctacactaaagggtaaaatgtcatgataaaacagaacgatatgacaattcaggcgtataatatattagaaatgatatcccaatatacggggaataatataatagaaatcgttactaaaacacaactaagttatgaaagttgtgagtttttacttacacaattagaaatggcgggttttattttaaagcatggcgagttttataaaagaacaactaagagggttaattaattattgcataacatcaaaaaaagattgatggtaatttttccgacataaaagataaggtatatgtgatgagatagtgaagagaatagttacatctgctagatgaaatggtagtggatttttttatagtgaaaatattactgttgctgaggtttacgaagatagggttaagattgaaaaaatgcctaatagatagttatataaaataaataggccaatttcccctctactttttatattaatgaaagttaaaggctagggactaatagtttctggcttttttattatttagataaaggatattgatgcaattatacaataatgatgcattagctatattaaaaacattacctgacaattatattgatttaatcgccacggatccaccgtatttcagagtgaaatcgtgtgcatgggataaccagtgggataatgttgaggcatatctgtcttggtttgatgaggtactagttgaattctggcgagtattaaaacccaatggtagtttatatttattctgtggttctaaattggcatcagatactgaactgcttgttcgcgggcgatttaatgtattaagccatattatttgggctaaaccatctgggccatggcgacgacaaaataaagaaagcctgcgcacctttttcccttcaacagagcggatactctttgctgaacattatcaaaagccaatcaccgctaaaggttctgaattttctttaaaatgccaggagttaaagcaaaacgtatttaagcccctgattgattattttagaaatgctcgtttagcactacaggtgagttctaaggagataaatcaagcaacagataagcaaatgttcagtcattggttcagcaatagtcagtggcaattacctagcgaggaagactacaaaaagttacaaacactgtttacacacattgctgataaacaagaaaagttatcgtcgttatcccgccagtttaccgagttagagcgagaacaattcaccttacaaaaagattatcaagaattaataaaagaatatggtttattaagacgaccattctttgtaactgcagatgtgccttacactgatgtgtgggcttatccacctgttcagtattatcccggtaaacacctttgtgagaaaccatcggccatgatggaacacattattcgctcaagtagtcgcgaaggggatttggttgctgatttctttatgggatcaggagcaacactgaaagcagcactaaaacttaatcgaaaggttttaggtgtggagcttgagaaagagcgttttgaacaaacagagcaagaaataaaagcgctaacttgtaagtaattcttacaggttcagttatctggaatcctcgggtggttttgttgtgaaattatttaataataaaattatttactatgaggttttgacaatagagatcatttattactctttattattatagtttttctatatttttttaataatgaggaaaaaaagcactgtatgtaaaaacagttgtttagattgtgatatcatctagttaatttacttaattacattgaattatgtttaattatatataaaattttccttatgtttatataagggaaagcatatggccacttttaaattttataatattcagcttctgcctgtggatagaaaaaaagactcagaagtaggcgtgtctggatattgcaaactttttgaatctgttgagaagcaacttgaaacgttaagagaggaaaaggaaaaattaagttccgtttctgccaagcttattggtgatatgtatttctcagcgttttcgtcatcaatatactcttatcctttggaaaatggtgagcaatacttaatccatgggtattttcttaaattcgatgatgttaacacattagttgatacagaaagtgggaagattagttatacatcatctggaaataatagtagtcgtaggtttcagtttgagtttgttttcgatcctgctttacatatccttgctattcaggataccaaaggattaccaactagaaatgctttaataaaagcattaaaggaagtattaggagcccatgccaacaatctttttccatatcatagtttagaaatcatagagttaacctctgcagaatcgatacaagattttttcttagcacctaaaaagggatataagacttataaaggggaggtaacgttttctaattcagatgagtttgattttgattcagaagatgaattaagagagttagcaggagaacttgaattagaactgaaaactaacgaggtacataaatgggaaacaagttaccgaagctttaaagatcatttgatgaatgacttaccaaaaaatgcaaaagctcaattaatcttagctgcaaaatttggtaatgctgaagttagctataaagatgaaaataatgagttacaaagatataaaatggaagattatcccgttaaggagaaatacaatgagactaatagaacgcaaggaataaagaatagaaccttaggtataaagaatttgattgttttagcaaatagaagagctaaaaaagcattaaaagctattagcattaatagaaacctttttaaaaaagacaaataaaataggaagaaaacatgaataggcctatgaaaaatatgatttatctaagagttagatctatcccaatcgtaggttctatttttcgtattgcaaatgcgtatgcttttaagggggagcctcaatgcaataaaataatagctccatggaaatattggtgggctaggatttttaaaaaatttcttatagttctcatattcacgacgattatgttttttcttgaaaactctttagcaagtgaatccccatggaaccctgctgatactgtattaagtatatttccgagtattttagggtttgggattggagtttatgcgctaatgtttattatgcctagtgactttatgcattatcttaaaaggcgttatgagtcaggtaaaagcgaaataagccatcggattatcccagtagatatgggatatcctttatctatttttatagtcgttttgtgtgtggcttcgatttgtaaattgtttaatcaaaatgggattacctactttgccagtttgttatcgctgttttatgggttaagtatgtccatagaattaatgtcttttttgtttaactcatcggttagaattcaagctataagaagtatggggaagaatgacaaacaataactgatatgggggtggcttagtccagtctatataataattattgctgtaaattaaagaccacttcggtggtttttatgtcaacttatatcaggactagtcaccaaattgacttaaaacttagtaatcaacctaacgtattatctccacatctaataaataatacgcaaataacatatcaatcactcacttatccaactgtgtgcctgtattcctttaactaaactcggacactccgtagggggggtatatgcgcatggacaaattaaccaatgctacctacggaacagctggcttaactgccttttttgttagtttagaaaaacgttgtcagattgcactctcacatcatcggtactaatcatgaaatataggaaactctatgccgtcattgtgatggtaggcattattgtgggtggctattgggtgattaacaggcaagctaacaggattaattcactgatagataccaacaaaaaactgatagtggctcttgaagaacagaagtctattaatactgattatcaagcacgcataatgcggttaaaccaactggatattcaatatacgcaggagctagcgaatgctaagaatgaaattagtcgcttgcgtgatattagtgagcgtaatcttgaacgggtgtatatcaaagccgagtgcccaaaaagcaaaaccactccctccaccagcttggcttctgcaaccaccgccagacctactgacaccgctatccgaaattattggttacttagagagcgaattgcagagtcagagcagatgattaaagggttacaagattacatcaggcaggagtgtgtaggtgattagcgttttttatatctataaccctttaatatctatattaaatatattacataagagagtagatatcgaaagtataagtggactcaacaaattctgatttcacggttattgagaggctgtttttattgtattttaacgggaatttatctaagccctctaaaaggcatgtataataagcaatatcatcagaatttctttgcaagaatttcacgttactaacgggcggttttttatgcattttcctttgttgaataatgtgaataaaatggcttgtttgactggataaattacgagttaagtcagaaataatgttattttgaaccgccggtatggttagatctttcggataatgatgtttaaattcaatagtagcaatcaaactagattcatctttattcaacgaataaagagataagtccactgcaccattcctactttttggatgttctgtcattgctaagtaatcagagttctcattgataacaatggtaatttcatccctaatttgattctcatgttttcgattatagaaatataaattaagttcgtgtaatttttgcttaactcgcgggtcttttattgcgttaattaaagttaaagtcacaggatctatatgaaatgttttcattagtaaatgatattttttttggattgtatgtaaatcttatcatgataattaatatatagagaaatcatgactaaaaacttagtttggatagcaatcaagtgagtttattatttcttatgaaaatagttacatgaaatatcatatctgaaggagttatgcgaaataaaactaagaaaaataattggttacttagagctgaatcaaagtaaatgattaaaggaaaaatagtttgtgagtttgaaaggaaaacaatttttttatgattatataaaatattacatgagtaaaatttcatgatctagatcgataatatatcctaatatagctgtatttcatatgctaagatacatgtaaatgaataattcatgtttacttggtgtagtgtatatggcaaataacccacttgctgaagtccagcgtgaatcagcaggagcaagtactttcggaaagtataattttcaatttcattgggcattatgtgagattattgaaaagcacaaaaaaaatcaggaatatgctttattaattgaatatcaggaagatgttgtaattgctaatagtttagatccaaacaatgcacagtttgaattttatcaagtaaagaatcagatagctaagtatacatcagcatctcttacaaaaagggataaaggtaaaaataataagcttaaaaactctgtgcttggaaagctacttagttcttgtgttaatacttcatatgaaaatagggttgttaagattgggctagtttcatcaagtggatttagcctaaatattgataaagatcttaaactagatgtaatcaagataggtgatttagcaaaagatgatttagctagttttttactccgtatttaaggtagcaaatttaaactgatctaatgatagataagcattgtttaacagcctatacaatgctaaaagtcagaacctgacaataaaatatatcttattaactaataaaataagtagtattttaaatattgatgctacgccacatgggttggatagaagccgctgacttaatcattaaaggtatggaaggcgcaatcgaagcgaagaccgttacttatgatttcgaacgtctaatgaaaggcgctaaactgctgaaatgtagcgagttcggtgacgcgattatcaaacatatgtaattgttgatttgataaatagttaacgggagcttattagttctcgttttttattatcaatattgaaacggttatcaaaaagttatcaaaacgagttatcaaaaccacctgaaatttgagcaattaaatcacgatttttatctaatttttggcgttcaagttgttacctgattactcagcgtctaattttgctttccagctataaagtaatttatcggtgatccctaaaaaacctgccgcttttggagcgctataaccttgttcgctgactaatgcgaccgcttcttgcttaaatccagtagtataaacactgtttgttcgttttttcatttaacacttcaatagttagattatattccattattaaagagccctgtttgattaaagtagatcaaataacccctaaatttaattacttataataaataaatattttttatttcttaattaaaatttttgttttaaataggctgcttattctaatttcaatagtctattgatgaatggtttaatttatttttctatctttatttttaattatcttaaaataatgaaatagctgatgtaatcatatttaaaagtgatattattattttataatcatttatatatgtttacattgtttttattttaatgctggagatacacgtgaataaaagagtgctttcgacaaaatatcgaaattcgatgtgtccatcaatgataaaaaaaatagggggatacggtttatcgttattcttgataccaataatattctttcattccgctaatgcgttagagttatccgttcctattggctcaacaggttatttaggggaggtcactccgccagttggttcaacaacgaaaaattatgggatggtaagttcagtgcttcaggcgaatagatcttatataagttttcggtgggagcctagtcaatttgtgataagtgacctgcctttttaccccgaaatcggtcgagtgggtgtggctatctacaataaaagcaatcctaaaggggcctttattgttttagcacccagtggatatggtttgttgcgttataaacgggctaacgatacatatgagaatgcttcattttcatttagtcgttccaaaaccaccgctatgacaaatatgtataataattttccctctaattctgatgaattaagttggggtcttttgcccagacaaggcaatagtaattttttctcagcacgatacgtagatggtagtgataaagttcattcgttaacattaacaatatccagttattccgcgtatgccatcgggccattagaggccggtgaatatgccatgcgtgatgattcaaaattttatgccgtcattcgcactagttcaggttcttttgcaagatctaaaacattattaagttcaatggataatgtgaatattaaagcacttaaagcctgtgacgttatcccccaaacgtctaccaatattcagtttccgactcaaatcgcgaaaaattatgcaacacccactaaattagcagataatttagctagtatcagtgtcaattgtccttatgctaataaaaatatctatctcactctgagcccttttaataatttagtctcaggcagtgaaacagggatggagctatccaccagtagcactgaaaatatcaccacactgccttatgtggtggcttctttaaaatctgcacaatcaaatatttgtcaagccaatgcacaagatgccttgcgactcgtcggtagtaataaactagcacaacaaaatatgaagagttttacgcaaaatatactttttaacctttgtgctaatggcaatatcaaagccaataaatatgcaggggcaattaatgtagcaattttaattgaatagcggtattccggtattattgataactggcttgcgcactacatgctatgttaaagaggagttttgatgatttaggtaacataaagaaatcatttaaaaaatatttaacatccattaggtaggggagtgcaaactgtgcttgatagccatcagttaattgctggtggttttttattgaagaagattatgtcagataaacaagagataggtgagtttatctacaaagtcttttcagagctattttaatattaaatgtttttctccaactgatgatatagttactagttaatatactaggcttaataagctattaaaaataaagtccctatatttgtcaatattgttttaataaatttaatttaggttttattttaacttttggtgctattgttttgatttatatgtaggtcacactcattatcaactatattgcagatataaagatagccatgtatatggtgatattccaatatatacttcaggtgcgctatttgagggcgatgactatcttatcgatgtgaaaggtaaatacattagtctaagattacggattgattagatatgatgatccgtaaggctgttgctaaagaacctcataatttttaattaataaactcacttctgtgagcttattaattggctttttacaataatgaataacatagttatatagagaatggtatttataaacaaaaaataccctgtgatttttatactcacagggtgtttaaatgaagcaaaaataaaacttaattagatatcaacacgggggttgatagagattttaatataaccaattagttagaaagtctctaatagtaactactaagtattgcaatagattaaaccaatttgtccatagcattattaatgtgtattagttgcaatagatgccaaaggagaaatttaaaatagcttcgccaacaaaatctaacctattagtaatatcgacactatttgcagcaaggcgatcacgtgatgatttatcaacattttttgtactgattaactatacctagttggcgaaaagataaatagtacacattaatatacaaaatactgtaattatatacagtaaaagattgcatttcgaaaaaatttgtcttatcatctctaaatagtgggcaatttgttactaagcacactaaactttgttaaacctcactcatttagtgaggttttttgttatctgaaattagcgaataacaggcctaaaaacatgccctagttataagactaattaagttaaatggaaaaaaacttatcaataatataaggaaatatttatggaacactttactaaaaaatcgttatttacctgcgataaaactaatgaaaatctccctaataaaccgggtgtaataacacattgccaagagctagcgtctgacttagggttaagcgaagcttttgcgcaatacacaatatcttatacttcttgtgacagtgttcatggagaaattatccgtgaagatactggtgccgtttttattccgaaaagtcaggcgcctaaaaatggttggcctgtcattgtatggaatcatggtacggtagggatagcgccaacttgtgctccttcattaacacctaaaaatagtcgcgtatcgcaatatttaaatacttggctatcccttgggtttgcgattgttgcaccagattatccaggtttaggctcatcagggttgcatcattatatggatgaaagagcaacagcatggagcgctttggatagtgcaaaagctgtcttgaaaggtgggttttcgctaagtaatcgctttatctttatggggcaatctcaaggggctcatgctgcatttgcctctgtcggctatcagcctgaatatgcaccagaattaaatatcttaggtgcgatagtgacagggacgccttattttagtgataatctacttgaaaactttattagtgatggtgttcaagatgaaggtgatagaaagctaccttacgcgatgtacttatatctttctgctgctgataaaaatccaaacttaaaagtggaagattatttccaagaattagcaataccttatgttgaaaaagcgaaaacgctttgtatcagtccattaagtcaattagtaatggataataaattaaacgcatcaaatagcttaaaacctaagttttacgagctattagagcaagaagcgtcaagtttaaattatagaaaacttcttgttgataagcccgtatttatagggattggtttagaagatattcatgtgttaactcgttggcaacaagagtttgcaagagatgtattggaagcaggcacaaatgcatatgtatatgaatatccgaatattggtcatttagatgtatacaatgtctctttgcgaaattcagtgccttttgtatttgaactgatgaaaaatgagcatagcaaaatagactaaaaactattttataactgattaatttctatcttaatcttattcttatcatttgaatgtggaaagatgagtgatgtgagatgccagatcatgttttggttaaagaacatctggtatctctttttattttaattctttgatttaaggaaataaaaacttatttttattgataagtttttatgattttgtctataatcaatcttattgatagattttttattcaccaaaaataaagtttgctatctgagtttttctatggcttaatgaagtcactggtttggaagtacagacctatttatgttagtcagtttaaagttgttcccgtttagcgttatccttgataccacttcattgcgaattccttctaattaattcccataagtaaaaataccaaacaaaccatatatgccttatggcaaattaaataaattaaaggaaattctatgtctaattcaatgactggtacagtaaaatggttcgatgaaggtaaaggttttggttttattactccagcagatggcagcaaagatgtattcgtgcatttctctgcaatccaaagtgataacttcaaaacattagctgaaggccaacaagtttcatttaccatggaaaatggtatgaaaggccctgcagcaggcaacgtggtggctctctaaaggcgctattacaattcgcctctattttaaatgcccaagttgtcgcggttcacaatatagaacatcacaatttgatgttacagtgaacaatccacacggcgcaaaatgtatcttttgcaaaagtgtgatgacagctcaaataagttaagcattaaatagttgaatatacaaaacctcgcttcggcggggtttttttgctatctacaatcttatattgactaaagataaaaaatttatattttagggcttgaaaaatgcttgctcgttcatatttatatattgggccaatcagatatcgcccataattcaataaatactgaaggaggaattatatgcctaatattaaacctttttcattattcccaactttatctgacaatctactttcaaaccgttttgatcagatagatcgcctgtttagtcagttaacaggcagtaaaccaatttcatcaccgactcagacttataatctgaaacagattgatgataaccattatgaactaacagtgagtgtgcctggatatcaagaagatgacttatcggtttcattgaaaggaagtcgcttattgattgaagggaaaaaagaagaaaaattagaagaagacaatgataaatggatccaccgaggtatatctcaagggcagtttacattgcagtttgacctcggtaaaaatgtcaaaatagaaaaagccgatttatcaagtggacttctgaccattgctattgaatatgagttacctgaagaagaaaaacggcaaacaatagcgatagaaaataaagataaaagctaatttagtgagatagcttaaataagattaaggctgcacataatgtgtagccttaattttttgtaatagcctataaattataatatttgaataaagaagtgcaaaataaaccggatgcttaaagaagtgcaagcttacactagaaaaatggattgggtgtttatggctcgcaatagatacacttaatcgttggagtatatgtgttcataacaaacctctttaagagggagcactttatgtgaacgcataatgagatttaaccatgatagtttatacagtagtaaatgtttaaaagattaaatactgttgatacaagaaagtgtgtcaaaaaatgatatagatatttatactaaatatttaaaagataagttattagtaaataatataccagtttttatttattatctaatatagaaatgagttttctattattaaaataatgacttcagaataaagaaacgatatgatttattttatttaaataggaactgttatgaaaaagccactttctttatggataactcaatttttgattgtctgctgtattatactgatattatatttttttataaccaatgcatcactgttattaaatttgtatagttttgatatgcccgctgagataaaaatagaaatttatttatggagttttattcgtttgttagttttaattatacaaatatcagcgctttacttttccttcagatgcgataaaagggcgcgggtattgactatcttagcttggctaccaatcattatcgtcatgttatggagcaatttccatgaagggttaacttctttgaacgaaagtggtataagctatgataatgatgctcaaagatctggagggattataggtaaacttattctggctggattatccctttggttgacatctattatattattttcaaaaaaattaaagcgttattttctatttgagaaaagtgaatgatttttttgactacaaaaatggatggcttaataaccatccatttttattgcataaaatatcttggtataaataattattaactaaagtataaatacataattattagaaataatatctgtatactactccacttcttgtcgtgacaagatattaggtaaatttatttctatccaatccgcaagaagcgtgagtttctcacttatttgctcaccaagatctgtcaaagagtactctacatggggtggaacaacaggatatgacactcggttaataaaaccatcttgctccaatacttgtaacgattgagacagcattttctcacttactccgccaattttacgtcgtaaatcactaaaacgatgtgttccatctcgtagggctattaaaatgagtatgccccaacgacttgtaacatgtttgaggatctctctggatgggcactgtttagaaaataaatttccttcacgtaattgctgcgagagtgtggatattgtcattgtatacttacctttttgtatgtacttacttttagtaagtttaggtgctatgttatcaaaacacaagtgatacattaaggagttatcttatgattgcaattactggtgcaacaggcctattaggtcaacatgtgattgaaaaccttcttcaaaccgttcctgctaatcaaattgtggcatttgctcgtgatgtaaaaaaaggatcgtctttaagtcagaaaggcgttttagtacgtcaggcggattacaatgataaagcttcattaataacagctttacagggtgtcgataaattacttttaatttcctcaagtgaagttggcaaacgtaccattcaacatcgtaatgtcattgaggcagcaaaatcagcagatgtacaatttattgcttacactagcatattacatgctgatcgctctccattaagcttgcatgtggaacatgtagaaacagaaaaaatgctagctgattctgggatatcttacactttattacgaaatggctggtatacagaaaattatctggcaagtgtccctgcagcaattgagcatggcgtttttctgggggcggctggtgatggcaaaatagcttcagccactcgggccgattatgcattggctgctgctcgggtaattagtgaagaaggacatataggtaaagtgtatgagcttgcgggtgatgaagcttggacattagagcaattggctaaggaattgactaaacaaagcgggaagcaagtgatatataacaatttaagtcaggccgattttgtcgctgcgttaaaaacggcaggcttacccgataaattatcaaatatgctggctgattctgatatcggcgcatccaaaggtggattatttgatgatagtcataccctaagtaaattaattggccgacgtacaacaacacttgcggagagtatcaaagcaatattgtaaatcgatagctaatatctattctattttcagtttaattttttggcaccctaagagttgaaattttgggtttcacatgcagggtgcctttcataagcattattatttatgataggtgagcatcaattaataaaagattaattttagtcgtaaaatagtaggatagactgctacactaggtaacaaaaatgaatataactaaatgatattgaaaaatatttattcagcttaataggactttatatgaagctagtttcagcgatattattaactttattttttgtttcaggatgttcgacatcacagtctgatattgataaatatgagcaatcgagtaaagatgcgatgaagccagatccatattctgacagcgtaatcaatacgattagacagcaccagaagatcaccgtatgtaatagtaaaattggtgggtgctattgatttaatacggcacagcgttaaggttaaacaatatactttaggatattctgtgcaattaaagacacagatgcgttaccatcaataataatgtcagcactcagcttttctctttccgtcattgctgtatatgagggtcgtgagtagattaagtactcttctaaataatgaataatatcatttccacttttctctttataatcacgcaatattcttcttgctaatgcgatatctagtggtgtatcaataaaaaaagcatagtcgatcatctgttgtagcgctgggtgagatctggcaaaaggataatccaaaatgatatgagtatattgagactcttctatcgtctgattaacttgttcaacaaatggctttatatcccattcgctataattaccaccttgttctatccactcatcgagatcttcaggtgctgtagggcagtcgaaatcatcaaaatgaaggcatttgcttgatggaagcttttctcttatataatgagaaagtgctgttttgccgccacctgcaattgaggtgatagagataattataggtgattttatagaactcattgttagctcataatcaaaataaaattgcataggatattatatagactaatttatattaagtataatttatttatagtattctgaataagttcagtttttagaaaaacttaattaattatagtaagaggtaggaattaataaactatactatatattaatataactcaataagtaacatcgattttttgattataaaataagcggtattgtttgtaaaaatagttataataaccagagtgatcacttattctcactaagagcatgaacgtttacgtgttaacattatccaaggcaaacgtttagtttttatttttgagtgaaacatacatctttcgacttttttatttaattttctttctatttctgtgggttggttaataacatcgtttttggtactgccctgtgtttttaatagaaaaataacaataaaaaacaaagagataaagaataataatatatatcgcacttgatttctccggtttataaaaagcatggattgttgataattttatatacaaaattatcaacatgtatagtaataaataagaataattatatttttataaataatcttaaagttatcttaataactttttttgtatcacagtataatattaacaacggtgttattttaagtgtcgattaagcataccttcgaaaagggaattccatcgatattctatagtgttgattggtctagtgtaatttgcttttggcggggattttactaatatgagggcttaatatgcttttgattttttgtttgcgagtttttttatatctaatcaagcaaaaagaataattattcttgaataaagttaaataatatgtataaggcattatttttcttttattggtataataaattctgcagataaagcctgttttgctttgatgatatttttctcatctgaaagattaatgatttttttatccaataaattataattaggtaataaactttgtggcgtcatattgagaataaatgcaatagaaaacaaaagttctaccgtgatttttatgttaccattttctattcgagaataatgttgctggcttatccctaagcgatttcccatttctatgcctgttagtcttaactcttttcttctttgttttattttgtgtgcaatagtggagtttatcatgatcatctatttttataaggttataaagcattttttaaaagcaattaacttttagttaactgctattaaatgttatatatctgtattaatttagtactgctattaattctacagtcagaaatacaataactatcacttttagatcgatagcggtaaaatttaacataaatgcaaatttttagtatttataaccaaaattatcgattattcttatatattaatatcaatataaagtaattatcaaaatgtttttatcgatcgatttgtaatataatgatagcttttatctatcaaatgaatggttacgatcgtcaatatcaatcatttgattgttattatcatagcaacaataaagaagagaatatctaaaattattataattatttattatttttttgaatgataaataaatttaggtgtatgattttagtaagataatatggagctaaaaataagctgttttttagtttttttaagataaaacataggatgtcatcaatatgaatttttcttactgaaaaataataaattaatactaatttagtaagaaacggaagtaagccatataaataaattatttctatggtcgttgatattactaacaaagcaccaataaatatatttattggtgctttatacaaagttatttctacttaaccgtccaagcttctgagaagtcgtgctctgaaaataattcagctaagccactaatctgttttaaacgtagtacttcatcttgtgacatacctaattcatcaccaatcttttggtcattccaacctaatcttgataaatctctaactatatccgacattgctgccacttgatgttgccctctagcccgattatggcgaatagtcgctgccatttggtcagccatagtatgactttcaacatcaagtatagtaataggtaaatagccgttaattcgcttgtttaagctattttttttactcaataaataacgatggtaaccatcaacgacttgccattgtgatggtttatttttggattgttgaataggtaagacaacaacaggctgagtataaccgtcttttaccagagacgtttctagtaatctcttttctgtcggagacatgacattgggattatagtcattagcgataacttgttgttgctttatccaaagaacacagtcagtaggttcatttttaaatgggcttatttgatgaagcgatatttttattttattgagagcttcaattttttgttcatcatttagttttgctaggtactcttttaaaacagaaattatagtttcaatggtcatattcacaccttgctaaataagttgccagtcttttcgttttccttgtatccgtttgaaatatcgatcataacagtgtgatttagtaggactaaatgctaatgttctacaccaaaaatcgttacgcaagatggtcttacaaattcgtcgccaagaaggtatctgtttagtgctagtatcaccttcttgtgcatcaggtatgccatttgggtaatctcgttcggcataccagcgaagatagaccgctattttattacgataatgttctgctgttttctctggtaaactggctaataaaaagtgagcataagatttccacgtatgatgggaaggtttgctaatttgatgtcgcccatagaaacctgatttattacgaggattcgtatataacattccggcatcagctccactcactcgttcacaagcaagactccatgtttcaggctctagcacatgatataaccatagtcccttgcgttgctctggcccaaaaggttcacaaatacgcatttgacttaaactaacgcccgcttggtgcatcagatcataaatagggttatagggtaaattgaaacgcgctatataagtccagatatctttaacatgccaatcataaatagggtaggccatataataaaagccttctgctgatgccgttgtccaaggaatatcatcggcataacgtaactttcgattattactaatggcaataaatcggtttaaagattcatccgctcttatgcctagcaggataatcgaactgcgatgattacctgtgatccactggttaaatgcaggggtaaaatcttcaaaaagcatatttgggtgataaaaagggaaaaagtgagggtcagttatcgcatcttctggcggttgtcttacccattttttaccagactcccatgctgtccatgtaggttcatattgagaaatgccactttcagtggtgatagggagtgctatccagtaaaaccgttcaatacaatcttggtagatagatttcatttttataatatgatctatagtcgcagaatattgaacttcccaatcaagaaacatcacattaaattttctatgttgttttcgcgcttgtgcggcaacaagatgaaaaagcgcagtagaatctttccctcccgaaaaggagagagtgatttgttcaaaagtatcaaatatccactggactctctcttgagcagcttctaatacatttttccccagcgcaattttacgtttcaaagacataactatcaccaaaatagattagctaatgttagtattatcacttaatcatatttagatgataaaggtaagtattaattgttagtaattattaattttattttaatacagtagagtaactactctatttaattgtttttattaaactaactgattatggaaagatattactatattatttcaatatggcgttatgctgtatagatctgtgattatgcatttttggtggttttttatactaaatatcaattggttatgcagtaaaatgtataaaataatccagcgcaagggcgatttaatatcttttatttactaaaaataaaacagatgaataagtttgcttatcattaagctgagaaagaagatttcttaaccggtcaatcggcgcttttaatgtcaataacaccttacttaaccgttagagtttgatttgttttttatttaatttcaatattttatgttgtcttgtttagatgattacctgtttaactattcgttatttccagttattcgtggtttgtataaatcatagaataatcattttacgactaggattttgtatgacactagacactcacaatggagttaaagtatatacccccacagcattaaaactttatgactggtgggtattaaatatttctaaccgttatgcatggcgttgtgatacagataaatatttgctacctcattttaaaaataatcttggtgagaaccatatggatattggtgtaggaacaggattttacttaaaaagagctttagctaatataaataaaatagcattaacagatcttaatattaatagcttagattatgctaaaaaaaatattgttgatgataaattaacttattgcttacagcatgatatctatcataaatttcctaatgaattcaattcatcgtttgactctatttctttattttatctattacactgcttacctggcacaatggaaggtaaaaagaaagtgatagaaaatataagtaaaatattaacggaaaagggtgttttatatggtgctactatcttgggggctgatgttgaacacaatttttttggtaataaattgatgtctgtttataacaaaaaaggtatttttagtaactattctgactcggcagatgctttagaaaaagtattatcttgttttttttacgatgtatctattcatattcaaggagttgtcgcgttatttaccgcgagaaataaaaaattataaaaaaagtagtatagtttgaataaattgaaaatgtatcaagaaggcgttacacagttggagataaagttagcctcagagaattaatttatttgatagaatgacaactgtttgataaataacagtattgcttctagtgtgtatcgcttaaagtaaccgaaaaaagcttagttataaaatataactaagcaaaacggggataatcaaatcaaagtgtgtgtccatttaagatgatcaaaaatggataagcgttaaattatctaaccattgagaattaatcaactaaaatttaccaattaattgtaaattagatattaatacttagttatttttacttatttggagcgctaaaaatatgtacaatactaaaaatatttataaataatttatgtattgataataaaaataagtagcaataataataacaatatagtcgggttctctctacatttagcattgttaaataacaaatgtataataaattatttaacaggctgatgccttaatgttagagatcatgcgtttagtgaccaagttatacatcattttatgagatgaccggacaatgaatagaaaagagcttatcgagtatatacagaaaacatatgccgtaatccccgaatatttatggagtaagtaccctaattatgcggttttcagacatcataatcattctaaatggttcgccgtcatcatggatgtcgctgaaaacaagctatttgatacgggtaaaaataataaagtcgatgtgattaacttaaaagtaccggtgcctttagtgggggctctacgcttaaaaaaagcagtttatcccgcttatcatatgaacaaagagcattggatttctattcgcttagacacagattttgatgatgctgagctaaaatcattaatttctgaaagttacgaactgacgcagtgaaaggcttaatactaataatcaataacaaggtgaatataataaaaacttatagttataaatagaatatgtttagaaaaagcatctatttttgatgataatatgacttggaaaaagcaaaagtgcacccatgttaaaaataactttataacagttttgaatctgtgtttccttaaagtcattgatagcgtcaggtggagtaaagatgaacaaagtggtttataaagtgagtggactatggaacgaaacgtcctttgtaaatctatttattgcaacgaatgaaaaagaagtattatctgcaattatactatgggctcagtttagtggtgcaaaagtggatgatttatctattgagtattatagttccgtgcattaacacagtgttaacttattgattaataacttaattattactaaatatcaatcaatttaatcagatagctaatatttgctgtaagtatattagctatttgctattcatatctatcaatattgtgatatcagtggttaacggctatcctttcctttaataatattttacaaactaattaaatgataaacatagtaaaagtagcattatgttactaagataaattatgagcatagatttattaatctgattagtcaggttaggtgattgtttcatatgaggtcatagccatgcccaaaactcttatgagtcttaaacaaaatgattttacgcataaaaaaattatcgtaggtattagttcatgcttattaggggataaagtgaggtttgatggtgggcataaatgttgtcatcttgctgctgatgaattatctgagttctttgaatatcaatctacttgcccagaaatggctattggtttaccgacacccagaccagcattacgattagttcagtctaagacaggtgaagtcaggttaaaatttagtaatggaagtgaaggtgacttaacccaattgatgaatgattactctatcgaatatttgaggaggtttaatcaatttagcggttatatcgtgtgtgcgaaatcacccagttgtggattagaacgtgtccgggtttatgatccaataggcaacggcaataaaaaatcgggtacaggcatttttactgaaaatctgaagagaataatgccgtggttacctatagaagaagatgggcggttaaacgatccctatattagagaaaattttattacacgggtgtttgcgcttaatgagctaaatcaattgaaaataaataactttactcgccagacattaattgattttcatacaagatacaaactattgttattagctcattcacaaccgctttatcggcaactagggcgctttgttgctaacaataaagattgggattcattagagactttctttgttgaataccgtaatcgatttatggctctattacaacatcaagccacacgtcgtaatcacactaatgttcttatgcatgtgcaaggatattttaagcaagatttaacttctaagcagcgacaagcattaagccaattgatcttagagtatcgtcaaggaatacaacctttattggcaccattaacattaattaatcattacttatcagaatacccagataattatctgagtaaacaaaaatacttttatccttatcctcaatctttaagattacgttatggtttgtaatatattaattccactactgtatctatttttatagaaagaaaataactatttttaataagtgaattttatatttaaaacaagggaaataggactgctttttgtatttaatgctttgttaatgtaagttaaattataatattttgtaaaaggatgtaagtcagaccgttctgtttatattttatgtcagtattcttttttttataaaaagaggctgatatgtctacaatgaaaactgaagtcgttgttattcgtttaaccaaacaagagcgagctgcattagattcaataaaaacgatgccattacttgcagattggctaaaggagctagccctttccaaatggaaggagcaggcattacaattagaacaatctaaaaatggtcatagtaattaatgaaatacgagggtaacaatcaacaatcttaactaaaaccctcgataaaaaattattgaatagattgttagctattctatttcaatcagttaagttattagtgttatcaagttactgattgcaaaaagaaaagcccaatgtggcggcattgggcttagtgtctcaaatagatgggtatataaaaactattagagaactcttttactttaattcaaatttatttatagaattaacaataagtgctttttgatagaagaatagtgatgttcgtataaaatatgagcatttttatcttatcctgttttatagtcttaagttagaccaatttcatgcaatagtgtgtcgatatcctactttgttgtagttttatgttaatttttacttgatatcgctcttgtttttcacataaagagtatgacagtgacagcaatttaagggagacttaaaagtagtatgacactcatcactcattgataatggaaggtaggtaatatgtttccagaatatcgtgatttaattgctaagcttcgtcaaactgatccccatttccgagccctgtttgaacaacataatgaacttgaccataaaattgtacgcttagaacaccgagataggcgaggatatggagaagaagttgttgaattaaaaaaacaaaaattacgtctaaaagaagaaatacatcagatcttaaaaaatcccccagaagatgagtagcacaaataagtactgtatgtaattaataaaattaaatagaaataataaaagaaggccatatagctaatggccttcttttattatggtttaaagataatatttctcatgatatttatatcttttgattgtttgtgaataagaactaaaagttttaatactgtttatatgtttttattttatactgcataaaaatatttaatttagttaagttgtatagttaaattttatttaggtttttataaagagatgtttttttataaacataccagttttagttgttaattattattcttttatctgatattcatagagaaatataatggcaattaagattatccttatcctaattttaattttctttgcgataataaaaattcaagacgcaggtatcattttttttattaattacaaaatataggatatttatgaaaaatattattttagcactaggtttattatcattatcttctgttgctgtttcggctgaattaacaaaatcttgcgaagattattttaaagaaactgatgcctatgtcgcattaatggaacaaaatgatgcaactaaagcacaagcagaaacaatgaaagcacaatatgctcaatcaaaagaacaatttgctgcattacctaaagatgttcaagaaagcacctgtaaacaagctttagattctttagagcaaatgaaaaaaatgtctgctggtcaataaaaaatagatttaattaaagtcttatgtttagagaataataaggctttatttttatttcaaatttaaaattttccaatgtaacaatgaccatataataaccagtgttattatatggtcatcttaatattattttaatataaactatttctttcttgtttttttgtggaaatatttcttttttacttaatattacaatctctaatcaagataattatcccgccataacccatctatttatattattattttatatattcttgttacttgaataaagaatgctttttatatgaaataattgtaattcattttgtcgtctataaattttatggaataattatttacatctatttattgctcctatttaagatatgaattggtcttttattctaattttagctctatttgtagttgttggttgtgttgataaagagaggaatacatctggctctatagaaaaggtggcaacagagatagcgactcctactgttcaatatcaccacgatgaaagtcgttatcccacatttatgttatcaaaacaatctcgttttgaaatgcaagccaaggaggaaaaacagaaattcaatcaattatttaaatttggatttgaagagccaaccacatctactaatagcgaatattcctataaaaaggaacaacgtataagaaagaatgaccagtcaatgattattctgccagaagcgatacctgtatggaataaagataaacaagaagttgaagttaagtggagctacagaccaaaatatgtttttgatgcatattaaatttaacctttatgttttaggaagactatgcgcccaatttttttgttaataccatttatgtttttaattggctgtaccgagcaaatgagtgtcggaattggcacttctagaacgcataatataggatatccggtttgttcaacattagtttgtggaaagaatacgcgaacagttgaagaacaaaaggcaattaatgaagcggtgcatgaacagcaaagagctattatgcgaggagaaaaaccagatttaaaaattattgcctcatattaaataataccatcaaggagagtctattttttgtccttgatggtatagtcaatataagcgctaagctaagatagcgatgttatgttgtttataataaattttactctttggttaacatcggctttgggtaattcaattaaggtataattatactgtctatatatcgccagcatcgcttgataagttgctacggcttcatcaaatgtctgttgacgctctttatcttgtaagtaaatttctttccatggtggagcaataaacacggttgtagaatatctatatagccttattgcgttttcaagatgttggggaatagggcgctcacaaaagtgtaaataacctgctatatccggtatgcctcggtcataaaaataaggtttgctgttatcatctatattggatgcatcatgccatgatcgtagctcccagcttaacattaactcagcaaaagcgatcggatcaatccaaggaagggctgaaccaccaatatgactttgatcttgaataatggctctacctgcttctattgagcaagagtagccatttcttcttaacttattgataatagtgcttttaccagagccgggacctccggttaaaataatacggcaaggtttttgggacatagtaattccttaaataatatattttgactttaaatgattgagggctgaatgcagaaatttttagagggagaaaggcgaaaaataagcagtgctagcaaagaaagagaacaagtaaaggaggacaagatattacaattataatcgaaaagagaaaatatcaaaataaatccgcatcaaagatcaatcaatatctatcgacctcttttataacttatcaggttactttgtattgctattttaataactgatacgcatttatgcagatttaagcacataaatccaaatagaagcactatctggtcattgcaagctaaatagattacttttattatataatatatatgttttattataattcgtatataagggttaagtgtgggtattgtaaaaatttctgatgagctacatgagtatcttcgtaaagcaagtaatgtgatgtctcgatcagttaatgcacaagcagagttttggataaaaattggtattcaagcagaattaaatccagaaaaaacgtttccaatgattattaatgaaatgttagaaaaagaagcaataaaacaagagcataagtaaatataaaggagattaatatggataaaattacgattaaaacccctgaggaaattgaattaatgcgtgaatcaggtcgtttattagcccaagtttttacaatgcttgatgattttattgtgccaggtgtttctacattagaaattaacgataaagtagacgattttattactcatgatctgcaatcgagacctgcaagcaaaggacaatatggttatgagtatgtacttaatacttcaattaatgaggtagtatgccatggtgttcctaaagcagatgagctattaaaaagtaaagatattattaatgtcgatattacactagaaaaaaatggttttattgctgattctagcaagatgtatgtcatgccagatgcctcacctatagcaagaagattagtcaaaacaacttaccaagcgatgtgggaaggtatcaaagaagttaaaccaggtgcaacactcggtgatatcggtcatgcaatccaaagctttgcacaaagtcatgggtatagtgttgtaagagagtattgtggacacgggattggtcgagaaatgcacgaagcccctcaagtattacattatggcattcgaggacaaggtgttgtactaaaagaagggatgacctttaccattgagccgatgattaaccaaggtggacacaaaataaaaaccaaaaaagatggttggactgtagtcacccgtgataaaaaattatcggcacaatcagaacatactattttagttactgctgatgggtatgaagtactcactttgcgtccagaagaaacacttccataataaattaatttatatctatctaatttttgatgcaaaaattatgatataaatttatattattttaatagctagaaatattatttttagctatttttctatttatatattgatatttaattttattatttctattgtattttttagataaataactatatttatatactacaaggactgtataaaaaaacagtgtgatcatatagtgtattttagaaagataaacaggatgtttatatgcaaaaaatatcaaaactgatggaagcctggggctcatgggttgtaaataataatttatatatcaatacattaacaataaataaacgtgaaaatgtgccaatacgtgttaaattaagaaaagcctgtactgatcgccaaggcatcatagtctcggtatgtatgagtaaactactaaaaaatcataaaaaagattatgaattactagtcgattactatgtatttggacaaacatttattcaattagcacaagcgcatcgatgctctgatacttatatcggaaaaaaactcaaaaaagcagaaggcattgtggaagggatgttaattatggccgaattaatatttattattgagaaaaatgaaaatagtactttacgatcgtaatttaaggcttattctaaacaaactgatagcaaataaagaattgcaataatattgtttattgcaatttatctaatgagttcaacatttgctaataggatgttagcaatttaattaagtgtttttaaccccaaggagtggatgtatgtcaacgaaatatcctatcgttttagttcatggtttagctggttttaatgaaattgttggttttccctacttttatggtattgcagatgccttaaggcaagatgggcatcaagtttttaccgcttctctttctgcctttaattcaaatgaagtgcgtggcaagcagttgtggcaatttgtccagactctcttacaagagacacaagcgaaaaaagtgaattttataggtcatagccaagggccattagcttgtcgttacgttgcggctaattatcctgatagtgttgcttcggtaacttcaattaatggtgtaaatcatggttcagaaatagccgacttatatcgacgcattatgcgtaaagacagtatcccagaatatattgtcgaaaaagtattaaatgcatttggtactattatctcaacattttctggtcatagaggcgatcctcaagatgctattgccgcattagagtctttaacaacagagcaagtcacagaatttaataacaaatacccacaggcattacctaaaacccctggtggtgaaggtgatgaaatcgtcaatggggttcattactactgttttggtagctatattcagggattaattgctggggaaaaggggaatctactggatcctactcatgcggcaatgcgtgtgttaaatacattctttactgaaaaacaaaatgacggcttagttggtcgctcgagtatgcgattaggcaaattgataaaagatgattatgcgcaagatcatattgatatggttaaccaagttgcagggttagtgggttataatgaagatatcgttgctatttatactcagcacgctaaatacttagcgagtaagcaactttaatcatgataagtagtcatactttgtatactctatagttatatgatagatagttatatgatagcaaggtggcgtaaattattatggccaccttttttattagatgaaaatatcgaactagcgctgtttatgcacagatatagcaatgtggtaacccaataggtaaagcgcttgctctaggctatcgatttttgaagtttgattgatatcgagtaaacgctcaatttgggcgctatttagattcatttttcttgccagatctgcctttttagtttttgttgttaacatggcattatgtaatgcgatttttaagcaactaatagggggaagataaacaataaaatcccctgattgaggctcagaaggcatagggatcggcattttactcgaaataaactcttcaagtcctacatgtaaaatatctgaggcttctagttcaatatcatcttctgtatatgccactgcatgtatattgtcaaaatcacgataagtaatctcgtaagtttcactttcttcgtcaaaatgggatgttgctggataattgaacataaattgcctaattaattttaagatttatgctcatgattaaagcatatttagcagtttttatccaaagcaccgtaaaatcccgtccttcaggtcgaggatataaggcgcggttttttaactaactaggtgtttcctgttgctcaatgtactggcggataatggatattggtgcgccaccacaactccccgcgaaataactcggcgaccaaagaacccccttgtagtaataatgttgggcaatatcaggacgatcacgtcgaagtaatcgactcgatacccctttaaggctgttaaccagattagatatcgccagttttggcgggtaattaatcagtaaatgaacgtgatcccgttccccatccatttcaaccagttcaacatcaaaatcagcacaaacactggcaaagtagcctcgcaatttttcaattgcatcctgatcaaatatttttcgccgatattttgtgacaaagaccaaatggacgtgcatcaggaatacacaatgtctgccacggcgaatattagtttcatttttcatacaccaaagtataataggcaatatgaaacgtctacaagcctttaaattccagttaagacccaatggtcagcaagagcgtgagatgagacgctttgcaggggcttgtcgttttgttttcaatcgggcattagcacgtcagaatgagaattacgaagcagggaataaatacattccctatacaaaaatggcttcatggctcattgagtggaaatctgacacagagacacaatggttgaaggaagccccatcacaaccgttacaacagtcacttaaagatttggaacgggcttacaagaattttttccagaagcgtaccgcgtttcctcgattcaagaaacgcggtaaaaatgaggcttttcgctacccgcagggcgtgaagctcgatcaatccaatagtcgtatatcattgccaaagttgggatggatgcgctaccgcaacagtcgtgaagtcgtcggagaagtaagaaacgtcacggtcagtcagtcatgcggtaaatggtacgtcagcattcagactgagtatgaagcgacagaaccacaacatgaatcaacctcaatagtcgggcttgatgcaggcgttacaaaactggccacgctttcagacggtacggtatacccgcccgtcagcagttttaaagtaaaccagcgaaagctggcaaggcttcaacggaaattaagccgtaaaatccaattcagtgccaactggcaaaaacaaaagcgcaaaattcaacgtctgcattctcatattgccaatatcaggaaagactaccttcacaaagtcaccaacgaaatcagcaaaaaccacgcaatgattgtcattgaggacttaaaggtcagtaacatgtctaaatcggcaaaaggtacgacagaacggcatggacggaacgtaaaagctaaatctggtttaaaccgctcaatactggagcagggctggtatgaaatgcgccgtcagcttgagtacaagcagctctggcgaggaggtcaggtagtggcaataccacccgcctacaccagtcagaagtgcgcttgctgtggtcatacagcaaaggaaaaccggcagtcacaaagtcaattcgagtgccttgaatgtggatatacagcgaatgctgatatcaacggggcacgtaacattttagcggcaggacatgccgtgcttgcctgtggagggagggtgcagtcagaccgcccgtcgaagcaggaactcgccgaggtgattcagacatcagtctgaacgcagtagggatccacgtcctttagggcgtggaggatgtcaactttagaaaaaaaaggctattgtgtcagttgttatagtatgccagaaaaaggggagctttatgtatccagttgatttacatgcacataccattgcgagtacacatgcttatagtacggttagcgaatattttcaacaagctaaaaagaaagggattaagctatttgcgattacagatcatggtcccgatatggatgacgctcctcatgaatggcatttttcaaatttgccggtgatccccagaatggtcgatggtgttggtattctttatggcatcgaagcaaatatcaaaaatataaaaggtgaaatcgactgtactgagaagatgagtaaaaaattagatattgtactcgctggttttcatgatcctgttatgggatcactaggtatggttgataatactaaagcgcttattgcaacaataagtagtggtttagtacaggtgatcacccatccgggaaaccctaaatatcctatagatattaaggaagtcgcaaaggttgctgctgagttcaatgttgcattagaaatgaataattcttcttttatacattctcgagtaggaagtgagaaaaactgcattgaaatagcgaaagcggtgcttgatgccggaggtttaattgcgctaggctccgattcacatattgcatcatctttggggaattttgagcgagtattagaagtattggcggagatccaatttccacaacagaagatattgaatacatcaccaagaaaggtgcttgattttttacaagctcatggcaaaaaagagatcacagcgtttcaacatctttgagatagtgaaaaagcttaaaagctagcattattaaatgttagcttttttcaagtatcttatttgctcgagattgtgcatcgtgttagttaagctaacttgcttaaaagcattgttttatagttatgatgctcttgctcactatcattaaagccaaattgatatgctaagttatgtaactgtaatttatagtcagcaagtttactctcatcatcagtcataatagcaaattcagcaaagtaaccaagattgtctaatttatcgatagtgatatgaaattgctctagaaagtagatttgacgggattttgtatagtttaaaatacagtgataacctaatgttttaaacatcgaaaccgttttttctgcatcttctatttttactgcttcacattgggcttgttctgggccttttacaattaataaattgataccagaggggatcatttttcttacgcataaacttatagagggagcagggaaaggcgtattgggatgttctaaataccaatctgtttcatcatttttcgatataaataaagttgctccagcgagttgtaatgcatcaataaaatcttgaggtcgttttaagtggtatttcaattctgcttcaaatttaccttgaaagtgttcagacatctcttttccttatcaattgattattcaatatagcattatttattgtttgttgttcatattaaagaataaccctaagatttaactgggttataaatattgttattaaatttaaaatatagcaaatgataaattgaatattgtataaatagtgataagtgttttttatgtgttattttttagtgaaattatttattttataaaaataatttatgtttttgatttagggccaaatcttgtattttatttaatattaaagtgaaattcttaactaattaaatgatcacaaatcgctgggtaaatttttcatatgtgagaagggcgagggaaaaggtgaaaaatgaggattaagccataaaaaaagggctactgatgagcccttttaggtagcaaaaaacactgattttctgctaatttgattaatgttaatttaacttaacttattgatctattttcagaatacaccggtgaacgggttccaaccttgatcatttttcttttcttttaagtagtaagcataattagctgtcgccgcccataagaagttgagcacaatactgactacattgagaattgaagggcttagggaaagtccttccacgataaaacttaccacaatgataatagcaacattaatcccgaataaagttaatgctttacgccataaaccaaggataagaaaataaataaagccaaagaagaaagcccagatattcatcccaattagaatacgcttaccgaaagtcagtgctttatatgcagccttgtattctggagatttaggagaaccatatttttcgaagaaatcaaaacgctcttcccatttggcagaatattctttattcatcataattcctgttagagggtcatttaattgtagtcataaaaaaacgcatttttacataaagtaactttgcaaacaatataaatttattaacattttattaatatattgttttgtataataaatattatcttacacgcgatattagtttattttcataaaattcttattgttaaaatgtttatttcttttttataggaagaataagattttgagacaataaaattttattctaaagcgattatttagataaaaaataagaaatcaggttattggcgtaacctgacttctgataggaaaaatcttggcgttgagttatcgaacaactaaaacagaagattctgcatagctaacaacagaagaagctgtcgagcctagtaagtaggttttcattccagggttgcgtgagcctatcacaatcagatcagcttggattttttttgcggtctctaaaatacggtcgcgtgggttacctacggaaatataagattgggatgtgctattgggaatttcaatatgagataaactatcatttaacgtagataatgcaatttcaatacgttgcttatcattggcaagacggtcttggctgccaaaagcaaatccgacaaaggactcatagctaggaataacagataaaaagtggatatttagtttatcggccatcgctaatgctttgagatgagtgacaactttatccaataaaccaagctcagtaaaatcgatgggaactaatacagtttttgtcatagtggctcctcattaaccttttatatgttgggggctttagtgggttgttattatatacaccaaaaatcagtcacctcttaatattatcagtgcaaataaaaaacggtataaaaaaatagaaatattttcattttttgagatattcatatttattttatgtaaaaaggttgatctatcataagattgctattgatagtagaaaacgtaataaaaaagataataaataaaggaaaatatcttgatgtttttagtaaatatcgatattccatatgataaattatatttaatatgaattagagtgtgcagttttagagcgttactaaatttaatagaagattataaaaaatgaatttatttagttttaataaaatttatttttgaagaaatgagtataactgaaaatatcctttatatacaacatgttgtgtgtaattaatatttattttggccataatggttaatgataatcaattccattaattattatttgtttttaagtcaccataaatgagattggtttttatttttattctctctaaaagtataaaatatataaaaagtatatttaaatttactatatttttatttttagctgtgcataatatccataatgttaattttcatggttaggaagtaaaatatgttacatcaagatatgatcaataaactcaatgaacagctgaatcttgagttttattcagctaacctttacctgcagatgagcgcttggtgcgatgataaaggatttgatggcgctgccaaatttttaaaagcacattcccgtgaagaaatggagcatatgcaacgcttatttgattatttaagtgatacaggtgctatgcctttgttagggactattgaagcaccacctgctgaatttttatctttatctgatttatttactaaaacttatgagcacgagaagtttattacagctgaaattaataaactagctcacttagcaatgacaacacaagattactcaacatttaacttcttacaatggtatgttgctgaacaacatgaagaagagaagttatttaaatctattctggataaacttgctatggtcggtgatggtggtaaggcattgttcttgttagataaagacttaagtgctctttctacatccgcgcatatttaaataataagaataactatactgctgttttaacctggttggctaagtgcatataagcattgctcagattaacataataagctctactgtaatcgcacagtagagctttttttatcgacccagttagtgcaatattgcatatccatataactattttatatagacgtaatcgattttttatttttctactcctttaatttaatcatttcttaagctttgctgattattattttgtctattttctgttctttctattctctagtttgagtcgtcgatttatagcctattttagtttggcttttagattatttggttatgtattgaactgtgtagtgtgtcaattaaagtattatatttttgttaagtgtaaaaagggtgatatttgaaacaaaaatggcgctaaataagttatattttgagtgctagttcacaaccttttatttcaacgataaagaagcgcagatattaaagtcaatttgctataaaatcttctttatcataaatagaaaaatcacctgtaatttaagaggttattatgtcattaaacacacttaagacatcatggggcaaattatccgccatcgctgttttatttttaggcatgtcatgccaacaagccttagcacacgcacatctaaaatcacaattacctgcagagggtgcggctattgaacaagcgcaagcaccaaaagtgattacactcgatttctctgaagggattgagttggcctttagtaaagtaaaagtcactgataaagagggtaaagaaattactgtcggtaaattaagtcttgatcccgttaacaatacaaaattgttattgccattagaaggtgaattagcagaagggaactactctgtagattggagtgttgtttctgtcgatgggcacaaaacaaaaggttcttatcaatttagtgtaaaataatgactcctgaagacgtttatattttatgccgaatttttcattttgtggcagtcatgttcatgttcggactgagctgttcggctgccattctcgctaaagaaaagtttgttcctcttattcaagtacgcttacgcccagcattggcgattagcactatcactgtatttgtttccacttatttatggatgatagtgcaatcaggcattatgggagatggctggcaagatgcttggtcgctaacgatatggcaagctgtattgggaacctcttttggccaaatttggcaatggcaattagttttatcctctctcgcattaatcgctctctttattcatcaacgtagcattagaaatattagtctgttacttatctcaacattgatgcttgtgctgcatgcttttattggccatagtgccatgtttacaggtagtgaagccgtaatttataaactaaatcagagtatccatcttattagtggagcgtattggtttggtggtttatggccttttgttgtgtgcttacagtttttgcgtaataaagatgaattagctgatggcatgatcaagcctattattgccaccatgaaacgcttttcattattcggtcacttcgctgttttattggttatagctagtgggattgtgagtgccattatgttactccccggttggcctgcaacgacacaactttcctcagagtaccaaagtatgttatggctaaaaatagcctttgttgccttgatgttaggattggcattagtgaataggtatgtattagtgcctcatatccgtaagaagaataactttcaatggttgcttattaatagttggtttgagttattacttggtactatggttattttgacagtggccatttttgcgattaactcacctgtatagattgatatatacttgtattaatctatttttttaagtggaagataaccatgaaacgttttttatttgcgggcatattgatgcttttttcttttcaaactttcagtgcaccaatatcaacagtcagtaagcttcagtttggtgatgcttggccattcacccgtgaagaagtcatgctaaattgtcgtgctgatggtgcttggtttgtgattaatcccgcaactttagctcaatatccacttaataatattgccatggaacaaatgaaaagtggcaaagttaatgctcaactgattgatagtattctacttcctgatcccaatacacctgataagaaaaaatcactggaagctatagaaagtgcatttttgtctctttgtgaaaaaaactaatcatttgattgagttgcaataaaaaaaacacatttgttatttgtttgatttaaaagataaaaaatgagttatttgattttttataaagaatatgaagtgtggtaggggtgtttactggatctttacatattgttagctattatttaacaataaggttgtgaaatagatgtggcataagcagttttttacacgctattttctcattcagtatcactttttagcgcacggctcgcaatgagccttttccctaagccaggtaaatgatttacctggctttttttatgatgctttaacatgcgattaggctacttttaaaatccaatggtggttttctttgtcataggcatgacggtaaagcagaatatttttatctttcagttgcgcaggaatgctggtgttttcatcccatccatctaattgcatacaaaactctttatcataatcacatggaatatgaacataagtgagttggttatcggaagagtgtttcaaagtaacatcttcaatttcataacaagcaatttttaaggttgttttattcatgttatagctccaaggttatgcgatgttgtgttgtgctttcatagtttaagcttaaaagtgaacagcatggtgagcactttttaatcggatagttttaagcatagtataaatggaagtcatttccaaagtattttttagcaataaaaaaaacggatcaaattttgtgatccgttttaaataaatgtgttaaataaagttgatgatattaccgtttatggcttaggtattgcagtaccccattcattccactcttttggctctttagcattgagaatgaaattctgctcttgttttgctttagcctggagtggggttgatggcggtgtagcaaatgtaatgccaccacgtataaactgcttaaatgtaccgctgcggaatactccaccagttaaaccaaatgagaagttataacctgatgaaagccaaaactctgtgttattacgtaccagatattgatatttctgactaattctaatgtggatcaatactctgtcagacatattacctaattctagtccggttaccgcacctacttctaaaccacgataatagataggtgtgccaatttgtacagatcctgcttcagtcgcatttaatacaaggttaaggccgtctagataccgagagtcggtaatatttgccgtttgtaattcaaatatgcggtatacgccaccattgcctggctctgccttgatataaggctgaataagagaatctaaattatcgaggcctgaagcggttaactcaggggtgactaccgcaaatcggcttcctgaacgtgcaaaagttttcacatattcagggtagagtaccgctgatacactcaccgcttttttatccgcagaaagggttagcgtttccacctgaccgatatcaatacctagataacgaataggcattccttcagaaagtttactggcatcgtaggtttttaaagtaatttgagcaccaatggctctagcactcgtttcgctaggataaagtttatatcttgaaacattgttattaatattttcaaagttatcaaagcttatcgcgccttttaaggcacggtttagcggcgttgcttctaccgttaatcccgcaccatttaatgaaaccttcgcagcaccttcagtccagaacacactcttttcagtaagcaggtgacgatattgtttagaaatatggacatcaatatcaaattcatccattaaaggccgtacatcgacgatttctccaacttggaattggtggtaaagtaccacggaacctttttgaatacccggtagactagctgctttaagtgtcaaagtgacaggtaactcattgccctcaatacttgctttagcataaaaatcattgcgataaaggcgatattgttctttaggggcgccttggctacccggaataaggtggataccgccttcaagccactcttgaggtgtggctccttggatctcaataccatttaagcccatattgacgttaattcggctattagcgacaaatttgctgttttcgtaaatatagtgtttatattcaggtgcaatgatggcatcgaaaataaccccatcatcactgatgttgcgctgaataatttgtcctatcgtaatgcctctaaatagaataggttgcccggcatctacaccccagctctcttcactggttaatgagataattaatccatcttcaccatataaggctttgcctgcatccacggaagtggcagactgtagcacaaattgttgattttcttgggctgggggactattttccggagaatcaaaggcaatagcaccattaattaaagcagaaacactttccattttaatagaagcaccactctttagattaaagttgccctgaaagccggatacattccaaaaatgactatcttgacggatcagatgagcatattgtttatcaatactcagctcgataaaaataccttgattatctggacgtatggcatagctgtaaactttaccgaccggaactttgcgataataaacttgagagtcgacattaagagagcctaaattatccgccgttaaggtgataatttgttggtttttatcaatgttggctttaggacgaacctcttgagcaacaaattgaaactgcttttccccatctccaggaagcatactgatatagttgcctcccactaaggcatctaatcccgaaacaccagaaagactggcttttggggtaacaagccaaaattgcgtatttttacgtaatgcattagcaaggttttttcgaatatcagcggtaacaatgactcggcgtaaatcattactgagcgtcacgtcctgtacaatacctacatcaacaccttggtaacggataggtgttctccctgaaacaataccagaggctgattgaaaatcgatggtgatttgtacgcctttttcttgccagtgttggaaaagcaaccaactcgcaataaaaatagcgataacagggagtaaccaaaaagtcgaaattttacgtttgcgacgtatttcggcttgggttgcctgtgtgttgttttcttcttgttgcataagtatcccataataaacgactatcaaaccattcaacggcaaggatagtgagaatgacagctgtaccaaaataaaaagctgcaggtcccatagtgaatgtcattaattgatctcgattaattaatgacatcatcagcgcaatcacaaacaggtcgagcattgaccatcggccgatccaagagacaaatcgataaagtttcatgcgcaatagagggtgaatacgtgagttaaaatgaatgctcaatagtaaccccagcataatgattatcttaaagaaaggcacaaagatactggcaataaacacaataattgcaataggtgtattacctgaattaattaaagagagaacgccagaaaaaatagtgtcttcattacgctggccatttaaataaaagattgagataggtaataaatttgccggtaatagcaagagcatcgctgtgatgagtgctgcccaagttttttgcaaactcattggttgacgagcactatagcaagatttacatcttgggcaatggctcgaaggtggctttttaaaatggtaatgacatgcatgacaggttgctggactcgtttttatctctttttgtggataaaactgttgccatagttgatccatattaatgttaataagcattaatagacttaaaaccattaaagctgaaaaagcaactaagccatgaccaatatagattgtggcataatcgcctagttttatggtggcaacaccaaggccaattaaataaacatccagcattacccattcttttagcttacctaacattaatagcacgggacgtaaatttagatgtaaacgagcccctaaatggagatataaaatggcaatgggtagactaagaggagcggcaacggcacaaaaggcaaccattgttgccgttaatggagagccttgttgtgacattaagcgaataccgtcaagaacattggctgatatcatggtccctaataaatggatcttgataagaggttgagtaaaagcgatagacgcgaatatcagcatggtgatagaaagaattaatagccgagttaatgaccaatcacgataggtcgctaacttggcttgacattgtgggcaataggcgtcttcgccgcgcttgaggtctataggaagtgatacgaggtggtcacactcctgacaatgtattgatttgctttctttggtgactaaatcgctcatttatccgcctatttggtctttcttctcgcttatcctagcttaagcccaaaaaaaacctctatactcagtgggtcacaaattaccatttttattatatttacgcttttcattttacaataataagtatctgattttttttgtgcgcttttagtgtgtattatcgtttttttgtagacttattgaaaagtctgtattcaacctcaagataaaataagctaaattacaagatatgttatctattttagttatgctttcgttatgcaaataggatcttctgatgccacaattaaatttttatcaggaactcactgataatttgtcagccttgttgtctggtgaaaatgactttatcgcatcacttgctaataccagtgcattgatttacgagaagttagacaagataaattgggtcgggttttatcttaatgatggtaactcattagttcttggtcctttccaaggtaaagtggcttgtgtcaggattggttttggaaaaggagtctgcggaacggcattctcagaaaacaaaattctaagagttaatgatgtgcaccaatttagtggacacattgcatgtgatagtgcaagtcagtctgaaattgttctacctttagaggtaaatggacaaattatcggcgttctcgatatcgatagccctatttttggtcgttttgataaaaaagatgaaaatgggcttaaagcgttgtgtgacgtgctctgcgagcatttaaaaacgtgtcataccgcaaaatattgtgaattttgtgtaagataacaggcgtttgccgtagaaattgttggcaacactattataatgtcgcttgttcatgcctgcgctggttggcaaaaccgttgtaatcaggaaatttcatggaaaatcaacctaagttgaacagtagtaaagaaatcatcgcttttttagcggaacgtttccctaagtgttttatcgctgagggtgaagcacgccctttgaaagtcggtatttttcaagatctcgttgagcatctaaaagatgaaactcagctgagtaagacacagttacgttctgccttacgcttgtatacctcaagttggcgctacctttatggtgtaaaagaaggggctaaacgtgtcgacttgaatggtaacgactgcggagagctggaagcagagcatattgcacatgctcgtacacaattagccgaagcgaaagcgcgcgttcaagctcaacgagctgagcaacgtgctaaaaagcgcgaagctgaaggtgataaggagaccagtaaacgtccggcagcgaaaaagccaaatcctcgtcgtcaagcacctaaagacggtgaaaaacgacagcctcgccctcaaaagcaagctaatcaagcgcctcgcaaagcgccacgccaaaatactgaaaagttaaccccagtcaaagacatctcagtgcttactgtaggtcaatcgctgaaagttaacgttggaagtagcgtgatggatgcgacagtgctagaaatagcgaaagagggtgtacgtgtacaattgcctaacggtttggcaatgaatgtacgcacggaacatttaaagttctgatacggaggccaaccagagcatgaacaaacttttaaatgtggcttttgctatcggattagcgttaacaggcacttctgctgtcatggctgataaaccagccacgccagccatggtgactattaatcaattaccgacattaaagcaagagccacaacattccacagtgagtgaacgtgtcaccgctcgttttgaacgttcccactatcgtcaattctcgttagacgcgagtttttccgaaaagatttttaatcgttatcttaatttattggattatagccataacgtattattagcgtcagatattgcccagtttgataaagataaaactaaagtgggtgaatatttaaaaacaggtgaattaggtcctttatatgatctgtttaaccttgcgcaaaaaagacgttttgagcgctttcaatatgctttaaatcgattaaatcaacctatcgatctcactggacaagataaatttcagttagatagaaccaaagcgccatggccgaaaacgcaagctgaattagataagctttgggatgaaaaagtaaaatacgactggctaacacttaaactctctgacaaaacagatagtgaaatcaaagaaacactgacaaaacgttataaagctgcattacgtcgccaaacacaaagccaaagtgaagacgtattccaaattatcatgacggcttttgcgcgtgaaattgatccccataccagttatttatcaccaagaaatacggaagcctttgattcagaaatgagcctttcattagaagggattggtgccgtattacaaatggatgatgattatccaatgattaattccatggtaacgggcggaccggctgctaaaagtaaagcgctaaaagtaggtgataaaattatcgctgtcggtcaacataataaacccatggttgatgtggttggttggcgcttagatgacgttgtcgcgctaatcaaaggccctaaaggtagccaagttaaactagaagttatctctgatgaaaaaggggcgaagccaagaactatcactttaacaagagaacagatccgcctagaagatagagcggtcaagttaaccgaaaaagtgattaatggtgataaaatcgctattttagatattcctagtttctatgtcggtttaactaatgatgtgaaaacccaactacaaaaagtggctaaagacaatgtatctgctttagttattgatttacgtggtaatgggggcggtgcgttaacggaagctattgcattatcaggtttatttattccaagtggtcccgtcgttcaagtccgtgataataatggtcgagtacgccaggattatgatcgtgatgatgttgtctattataaagggccactagtggttatcgttaaccgctttagtgcttctgcttctgaaatttttgctgctgcaatgcaagattatgggcgcgcattaattgtcggtgagcaaacctttggtaaaggaacggtgcaacaatatcgttcattgacacgagtttatgatcagatgttaagtcctgattggcctagtttaggttcagttcagtacactatccaaaaattctatcgtattaatggtggaagtacccaattaaaaggggtgacaccagacttgttattaccaagctttgataattcagaaatgggggaaagcaatgaagataatgctttaccttgggacagtattccaccggctaattataagctgtctgagtattcagagaaaataaaacaagcactacctacattgacggatcaacatgctaaacgtatcgcgaatgatagagagttttcatatatctttgacgacatcaagcgctacaatgaagctaaagccaaaggtgaagataagtttattattcttaattttgcagagcgcgaaaaagagaataaagagctagaagccataaaattacagcgtattaaccaacgtcttaagttagagggtaagccaccactaaaatcacttgatgatttgccgaaggattatgaaggccctgatccttacttagatgaaacggctaatattgcggatgatcttgcaaaggtattaaaacctaagaagttattaaattaagtttttctacttaagaaagtgatccaaatttacccccaatagttgattaatcaattattgggggtttttatttccctatatttgtctaaaaaagtatctggtatctaatgctttataataaccttagttatatctttagtgagaaaatcgcctcatactattatttggctatttttctcagtagttatatttggttaccagtaacataaggattcattaagatatttaactgcttttatataaaaatattcttaatatcatgtaatctaagtttttatttgaaatctatttgatactagctttgaaaaatataaataaatggaatgcaaggaggtttagataaaaaatcttttataaggtaaataaaaactagatttttatctattaaataagataaaaaaataaatgccttattaaatgtgattaaattcacatttaatggtttacttattgcaataaatgtaacatgttgtgacaatgatcgctctagttgacataaaattacgatagcatacagatcataaaattttgtatcattctgacatactaaggtaatagtaacagattaaaaatctcacccaaatgctaagtgcaaaatctcttctcatcggcgcagttatataaacgctagatgcgctaattttagaatagattttctcattaaggattaatgactagaaggtaagttatttataatttgcttaagcattttattgctcaaaaaagtaaataacaatgtggtgagatgactacctagcattattgatgctaaaaaaatagcgatttggcttaagtttatacaatttaagcgagcgttacttttagctaaatataaaaatagtactttgtttaacttattgaatataaataaatttaaatagttattaaccaggttgaatttaaaatgaaactaaaaagaatggtgttgtttatgttttccccttgttttttagctgtgagcgctgctaatgctgggaattgggaaaatacaattaaagaaagctcatttatttctgattctgaacttgagctgactaccattaatatgtggaaatacctaaaaacagaaaaccgttttgataaacaagagcaacgttatagaaaacaagttgctaatgcttggggtcaaaacttccaagctgatttcagatctggctatttaggtggcattctaggattcgatgtttcttattatggtggtattaaattaggagcaagtaaagacttcgcttctcgtgccatattatataatgatgatggtgaagcaaaaggctataacaaaattggtcaacgttttgcaaaagtgagattcgatttagatcctgttttaattaatggtaaagcgggttggtttaccttgaagaatacaggtatttttactaactcacagcgcttatcattaaacagttataacggttattacactaatacggcgatgggtgattggagtttagatttgctgtatctcgacggaaaagttatgcgtcgtgatagcccaaatatcgatagaatgtatttcagtgatggtaatggtgttagacataatattgaccatgttattactggtggagttaactataattccaaaccattaaaagtctattatttctatggtcaggcggatgatgtattccgtcaacacggtttagaaacaaaatataagttaacatcagacgttactctaggtggtgttgtttattaccacgattatggcagtgaaggaaaacgcacattaaccaatgctaatgcaggtaaacgtaactttgataaggatgcatggcactttgctggtactatggaatggcgtattcctgaatcagcgtggaccattcgtacgggtgtgacttataccgatgcgaaaaaagccaatggtgttggtcaatttgcgcgtaacccaattgggaatactcgtggacgctttaactcaccggcttatgcagatattgactatgtgcgtgatggtgaagtgatgggggcattagaagctgcatacaaagttaacaatgagttgtctgttggtgcacggactaactatagtgaatttagttactccggcgaaagattaaaacaagggcagtttggcttatttagctactggaagccaacggctaatctttctatttctttaagtggcggtattggttggcaccatcaacaagaaaatgattacaccacaccaaaactgtatgatggtcactcacgacgtgctcactcattatcaggctctatgacaacgacatatcgttttaaaatgtaattgtttatagggtaagggataacagaattcatccctgtataggtgcatggcttgcctgatggtgagccatgtacaaaaatagataaagctgacatccaaacctttaatctaacaaaacgccttcaattaatttattttgttaaaatttcatcactaggcatttatttttgggcctatcttgcctagactgttattcctcctctatgtgaaaataatcctccataatttagctattaattacattttcttttattaaaatgtaaagttatatcgtttttagtagcaaacaagttaaaagacttgataaaataaaaaaaagccttatttataagatagtttttgcaatgtggtaattagataaaataggaacagtatcaatatgatgaggattgccttattcctgttaacaaacttagctgtcatgtttgtgttcgggatcatcttatctttaacaggtattcaaggccgcagtgttcagggtttaatgatcatggctggcctatttggttttggtggtgcatttgtttctttacttatgtcaaaatggatggcattacgatccgttggtggtcaagtgattgaaaatccaacctctgaagtagaacgttggttacttgatactgtaagacgtcagtctgagcaagtggggattaaaatgcctcaagttgcaatctacgatgcaccagatattaatgcgtttgcaactggagctcgtcgtgatgcttcgctggtggcggtgagtaccggattattagccagtatgagccgtgacgaagcggaagctgttattgcacacgaaattagccatgttgccaacggtgatatggtaacgatgaccttgttacaaggtgttgtgaatactttcgtgatctttatctcccgtatcattgctcaatttgtggcgaattttatttcgagcgatgaagagagtgaaaacagtaacggaaacccatgggtatacatgggcgtttctatggtgcttgaaattgtttttggcattttggcaagtatcattacgatgtggttctctcgctaccgtgaattccatgcggatgcaggctctgcaaaactggttggccgtgagaagatgatagcggcattacaacgcttaaaaaccagctatgagccacaagaagagagcagtatgatggctttctgtattaatggccgtaataagtcatttagtgaattatttttatcacacccgccattagataagcgtattgaagcactacgtagtggcgaatatctcaagtaaaagaaactattagcgataaataatttttaattatcagtttacaaatgccagagacagaaatgtttctggcatttttgttggtgatccattagctttgattaattcctacaatcgcttttcgttttatttaacagaccgttctggttcagccaaatatcctcatctcttaatatttttataggtattaagttaagcctcagagctagtgatgcatgatcatcatatctattgatagataaaaggcagttaaattaatatcaaaataaaaaagccagtttaaaattaaactggctttaagagatttaacttaattgttaatgtggtttacttcacattaagttcagcttcttcttcctgattaaagatctctttatctgtttggcgcatcatttggctagtaatagtacctgcggtcatagagccactaacatttaatgcagtacgacccatatcgataagaggctccacagaaatcagtagggcaaccagtgtaacgggtaatcccattgctggtaaaacgatcagggctgcaaaggttgcaccaccaccgacacccgcaacacctgctgagctaatggttacgatacccaccaaagtggcaatccaaagaggatcgaaaggattaataccgactgttggtgccaccataacggctaacatagcaggataaataccggcacaaccattctgaccaattgtcgcaccaaaagacgatgagaaactggcaatcgattcaggaacaccaatgcgacgagtttgtgtttcgatatttaatggaatactggctgcactcgaacgacttgtaaatgcaaatgctaataatggtcctgcttttttgaagaatttaattgggtttaagccagtaaatccaactaataaaccatgaacgacaaacattaagcccagcgcaacataagaggcaacaacgaagctaccgagttgaataatgtcatgcagattggagcttgccacaactttagtcatcagtgccattacaccgtaaggtgttaatgccataacgatacggactaacttcatgatccacgcttgtaagctatcaatcgctgctaatactttttcaccgcgaggtttatcttctttaagcagttttattgcagccattcctaggaataccgcaaagataactacactaataatcgaggttgagcttgcaccagttaaatcggcaaatggatttttaggaataaaagataaaattaattgaggtacagttaagtcagacactttacctatataattatgttgaatagcggctaaacgctgcgcttcctgttccccttgaacaagaccttccgctgttaaaccaaagatattggctataacaataccaataagagcagcaattgccgttgtaaatagaagtgtaccaatggttagtgcactaatttttcccaatgatgatgcttggtgtaaacgtgatactgcacttaaaatagaagcaaataccaatggcataataatcatttgtaacagttgcacgtaaccgttaccaacgatgttaaaccaaaggatagattctttaataataggatcgtgtgcgtcatagaatgcatgtaacgccagcccaaacaccaccccaaagaccaaaccgacaagaactttctttgacaggctccactgacgttggcttaatttagccaagatgagtaatagcacaacaaagacgagtacgttaataattaacggaaaattcatcttaactctccaacgagatttttatatataaatttggcgattgtatgcgatatgagttcttaggtaataagaaaggatataacagcatcaactcgctatatggtaacagtattgttaataactttttataatcaattattcttttatatagtcgtttagttataaaaacaaggaagattggtataaaaaagactaattaactataaatagatagaggaaagtagagaactgtcaaggagagttaaaaaggtgtacgtttatcgtggtacatttgtaaccagtgatttatttgtgtgggaagagaaaaagttaggtgtgggggcagaaatagtgcaccaactaagatgatgacagaaataaatcgttctccttttttgctattttttttcgctaaaatcggtaaggcaaaacgcatttttagtggccataaaaaaggtacacctgatggtgttagcatatctgccagtaggtgacttaagtaacctagcaaaagggcgtgaaaaaaatcagccgaaatcgtgatataaggcgcaacttgtgtttcccataaaatggctaaaccacaaaaggcgagtaggctatgtgtgaagccacgatgaccacagagttttgatagcggtaatgagattatccgaaagaggcgtcctaatatagagcctggatgatctaaatctggtagtagtgaacctaataagacagcagggatcatgtgaaaccaatcaccttgagcaagaacgggggttatttctaatttctgtgctaagacgagtgttgcaacagaaaaaagtaaatgtccttcggctgtcattccttatctatgcctatatgcggtttttaccgcttgctgttcatttatacagtgcttaagtataaaaggtttttacagcaactaacagacataaaagataaaaattgccttaattattaagcaataacagaaatattttattcggatgtgttaaaaataaccaaattttagataagggatgagaattaatatagaaaaaggatatcgacaacaaatgatatccttctataaatttttataggctataaccaaagtcgttagcctaataattgagatttggttaattcgttgagagaggcaattttaacatcggctaatccccaacatttgtcattaaactgctccgctgcaggcacaacaattgagcgcattcttgcagctttgcaagcaatcataccattgcgtgagtcctctaaagagacacaattaatgggtgcgacattaagtgccttagcagcattgagatagacttctgggtgaggtttactgtgcgctaaatcagctgcagagacaacagcagagaagtaatgacgaatattaaataactcaagtacacgctctagcataaaatgcggtgatgctgaggctaaggctatctttaaacctaatgattgacataaagatagggcatgttcaacaccagggagcagcggttttttatcttcaataagttgtacaacgcgagcaatcattctttctttagcttcttgttgtgttacgccttgccaaggtgatacttgataccaaagttcgataacttgatctattcttaagccgacggtgtcgggcatgctgtcagcaagtgataaatcgacacctaattgtgcaaagacctcatgttctgcttgtgcccaaaacggctctgagtcgattagcaaaccatccatatcaaaaatagcggcttcgatgggcaatttaaaagacatgtttactctccataataaggtctatgttgatgaaaaatgattgtagcaagagttgattggaaaatcttttttaatcagtttcttatttcttttaaaaaataaatagagaaaattatagctattaaattattgacatattagccgttaattagattaggatatttaggtgcatattgccgaattctatgagtgaggacaaaatgagttatcaacatgcaggaatatatgccattgtaaaacgtgttattggttggcttatttttattcctgcctttatttcaacgacagtttcgttgattgagttagctgcgatgccaagagcaaatggcgagggtgttaatgctgtaattaatgatttttttcgagtattagcagaaatggtacaatttaacaccccgtggctagactttttttggcgtcattctccagtacctaacactcaaataggttttagccaacagaatattatcttctttgtgatcttctttttaatgtttattggcttagcactgagtgcatcagggttaagaatgtatcgccaagtgaaatatttaaaggaaaatattcaagatcaactaattattgaacgagcactaaaaagtggtattacagcgcaagagctagagcagaatataaaattgccaagacatacactatttactcaagtcatggtgctgtatatttcacctattattgtgatcgcaattggttattttctgctgaaatttttaggctggtagttatctatcacattgacttaattaaaataaacctcgcaggataacatttggcgaggtttatttttatctatcggtaaataaaatcagattgttttagtgtgtgccgagcaaatcatcaatgatttttctggctgctaggtaatctttttcttcaccgaataaatgacagcgattaaggaaatagtagagttggtagataggctggcgtgataggaatttttcagataaaggccagatgctttggtaaccatcaaaaatattggctggcacagaagagcatagcggtaacatggcaatatcacattcgcgatcaccccaataacaagcaggatcgaacatcgttccttcagattgacctatagcagcacaatttttaggccataagttgccatgtaatagtgagggttgtggatgatgatcggctaaacggtgattaatgatttgaatgatttcttctatatcaccgaaaaccatccctttctctgaagcgagttgcaactggataccgatacgcttttccgaatagaagtaattccagcgcttctcccaaccatttgcttgaggtgtggtatctatatgggtatcgaaatcaaaaccataacggggttgttcttcccattgatgcaatttagctaactgttgaccaaaacaatacgcgctgtgaggtgtaaaaggttgcacaggcagaaattctaacagtaagaagctagtatctttactattgccaatgcctaatacgcgaggaatacggatcgtttggctttttgccaacatttcaagctgttctgcttcatttttaaaggtgggcaaaaattcccgtaggttagattttacaaagacagggatctcaccatattgaattttccaagtgtggtgtatatcaccgcttgaaaggtggtgtttttcgctgatctttgctgaaaatcctaaatttgattcaagcaaacgaccaatattctgccacatagattacacctcgcaaagttgtttacttagtagacccaaatagtaacgagcgatgtttatactatgacaataacactttaattaaatcaatacagtataaaactaaaaaacgggatgattatcccgtttttatagtaataaagattttcattaggcattggcgggtttagtttgccgttttatttttgccaatttaatctgattacagagtaatgcaataataaagaacaccgcttgcgtgagtacaatagaagggcctgtggcaccgtcaatatgaaaactgataaatgtaccaataacactcgatataacagaaaaaaggatagcgagagtgatcattcgagagaagcttcgcgttaatagataagcggtgatccccggagaaatcagcatggcgaccactaaaataatcccaacggcttgcatcgaggcgacaatcgttaacgccaaaatagagagtaagccataatgtaataaagcgaccgggagaccgacaattcttgcttgattagggtcgaaacaatacaacataaagtctttttgtttaaccagcataatagtaatagtaattaaacaaatagcactaatctgtataagcacatctggggtgatacctaagatattaccaaataatatatgcattaaatgttggtcagtatctacactagcgaagatcaccaaaccgacagcaaacataccagaaaagacaattcccattaccgtatcttcttttattcggctatgctcttttaaataacctgttgcaaatgagcaaaataggcccgaaagaaaagcccctatcgttaaaggaattgcagtgacataagctaataccacgccaggtaaaacagcgtgagaaatagcatctcccattagtgaccaaccttttaacaccatatagcaagataaaatagcgcaggcgataccaatgataaccgcggcaataattgcacgttgcataaaaggatattgaaaaggttcaatgaaaaattccattaattcattcatagttgcacctcttcttgttgagtaacgtcttttggatgctgggattgtgaaataagtgcttgtgaactttgacgtgcgcggcgacgggctgccaacatgccatgtttaggcgcaaataagaaggctaataagaaaagggcggtttgcattgtgacgataacgccccccgtagcaccattaaagaaataacttagataagcaccaacagcactggttactgtaccaatacaaatagcgataatagcgagtcgtttaaattggtcagtgagtaaataagcggtagcaccgggagtaaccaccatagcaataactaaaatagcgccgaccgtttgtagcgcagcaacggtacatgcactgagcaaggtaaagaagatgatttttagttttaaaggggataaaccaatagagcgagcatgtacttcatcaaaaaatacaactaataaatctttccacatacaaaatagaataagaaaagagacaccagtaatgataacgacttgccagacatcttcatcagcaatgccgagaatattccctaaaataatggtctgaacgttgacggcagtagggtttaatgaaaccagcaacagaccaaaagcaaaaaaagtagaaaaaataaagccaatcaccgcatcttcacgtaatcgtgtgatgtgacgaataaaagtcattgataaagcagcaagtagacccgtaaaaaaagcacccactgcgtatggcaaccctaaaatataagcaccggcaacgccgggaacgacggagtgggagagggcatctcccattaatgaccaacctttaagaataaggtaagaagataaaaaggcacagacagcaccaactaaggcacttacccagatagcctttaccatatagttatactcaaaaggttgtaggagtaattctagcatggctaatctccttgtttacgcttactttgatgagcgggagtatgttgttcatggtgaccatagaaaacggcagcgcgttcatcatcagtaataacggtaagtgaacgtggatcgtcgtcgtcgtgaagatcagggcctgataagctgatatgacgcaatacgccaccaaaagcatgctctaaattcttttgggtaaaggtggtttctgttggcccgctatcaagcactgttctattaattaaaataacgtgatcacaaaactcgggtacactacctaagttatgagttgatactaatactaggtgaccttctttacgcaagttacgtaataattcaataatggcattttctgtttttacgtccacgccagtaaaaggttcatctaataacagtacggtgccttcttgtgccattgctcgtgctaagaatacccgttttttctgcccaccagatagctcaccaatttggcgatgtccaaggcctgataaaccgacacgctctaaacaagcttcaaccacttcatgatcttgtttcgatggaatacgaaaaaaacccatttttccataacgtcccatcatcaccacatcagaaaccagtacaggaaagttccagtcaacttcctctgtttgtggcacataagcaatcatattttgtttaagtgcttgctgaataggttgattatttaatgttacggtaccttttgaaggtttgactaatcccataatggttttaaaaagtgtggatttaccactaccgttgatgcccactagggcacaaattgtgccaccagtgatagagaaacttgcatcataaatagcagtgtgaccgttgttataggttaccgttgcattatcaacagtaagagtaggatttatttttttatcattcattgtccaaatcctttcgcaatggtatcgacagtaatattaagtagatcaatataagtagggacttctccacccggggcagaaagtgagtctacataaagaacgccaccatattttgcaccagtctctttactcacttgtttagcaggtttatcggaaatcgtactttcactaaacacgacaggaatatggtgttctcttacggtatcaatcacgtattttacttgttgaggggtgccttgctcttctgcattaattggccataaatacacttctttaaaaccataatcattggttaaatagctaaaggcaccttcactcgttactaaccagcgtttttcttcaggaatacgcgctaatcttgctcttaatggtgcatcaagttgtttaatttgttcagcgtaacgcgcggcattttggttataaattgcggcattatctggatcgtgttcaacgagcgctttacgaatattttcgatataaattaatgcattgttaggcgacatccatgcatgtgggtttgggttgtttttgtaagctccttcacgaataggcataggggtaataccttcagtgacaacgaccgcaggcacattacgtaattcattgaaaaaacgttcgaaccaacgctcaagatttaacccattccataaaataagatcagctttttgcgctttgacaatatcttttggtgttggttgataatcatgaatttctgcaccgggtttggtgatagattcaacaacggcagcatcgccagcaacattttgtgcgatatcttggataatagtaaaagtcgtgacaacttttagcttatcttttgcctgtgcaggggttataaagaagattgaggcaactaagcataatgccgtaagcgaaattttatttacagagcggaacatatccatattatatagccttataattttcgtggaattctctaactgataatgattatcaatatcatttcaaaaaagtcaagttatctctgtgtgaaagtgaaaatagctatttgataacagctgatactaagataacagcatgtatttcaataaatgttaagtaaattgtcgtctttctttataaaaattaacaatcgatggtaactattggtgtgaaaggttgtttaatactcacaattgatgaaatttacagccaaatcatggcttactgctggttaaggtatctgtttttatgagagaagcttatccttagtccatttttttaatggacagcgttaggtttgtgttttttaataatctcctataaagcatagggcgaaatgatgaggataacgtgtgaagaccaacataatatttcctttggcaattttactgctggcagggtgtgcagatcccaatcaccaaacggcgaaaaaagagacaccgcgatttttaaatagccagcctgtagagcacagagttaataatgcctcaatttctactgctcaatggaaaaacaccccttttgatgagcatattaaacaagcttcagcccgttatggtgttgatgaaaccttaattaaagccattattcaggtagaatctaattttaggccagaagtgataagtaaatcgaatgcggttggattaatgcaaataaaggcatccacagcggggagagatatttatcaaaatagaggaaaagcagggcaaccaaccaccgctcagctaaaagatccggctactaatattgatttaggaactgcttatattcaattattaagagagcgccatttatctgggatctccaatcctgaaacactctattacgcgactattttggcttatgtgaatggggcgggtgcattactcagaacttttgataaaaatagagatgcggcgattgccaaaattaatgccatgagcgcggatgatttttatcgttacgttgaaaaaaatcatccagcatctcaagcaccacgctatttagcgaaggtcaaagcagcctatcatttagcggataacttttctgataagctggcagcagccgctgattgagcttgttgtaataaagcggggagatcagcaatgatttcaagtacaccattaatcataaactgaactcccatgcaaattaataaaaatcccataacacgagaaatagcatcgataccactgtggccgagatagcgcataataccggttgaaccgcgcagtgaaagccaaacaatcaggctaattaaaaagaaagtggtaataggtgcaacgtacaatacccattgcgcaatatctgtacgtgaaggaattgatgctgctgtactgatgatcatcgcaattgtccccggccctgcggtacttggcatggctaagggcacaaaagcaatattgggcgcctgaggatttcgatgcggatttttttcttctgaaagcggatcgtccacattgggagtatggggaaataacatactaaaaccaataaaagcaacgatcatccccccagcaatacgaaggcctggaatagagataccaaaggtcgtcattattacacgacccgcataaaaagcgatggtcataataataaaaatatagacacatgccataaaggattgttgattacgctgttctttggtcatattccccgacagaccaagccaaagtgcgaccgtggtgagtgggttagttagcggtagaagtaaaataagaccaagaccgatagcctgaaaaaactggtaaacagagtacatagagtgtaaaggctcctaacaacaggtaattaaggctaccgatcatagcaaataaatagtaataatagtgttgatattaagaaatatttttatatttataagaaggttatgggtattttttcattaaccactcaagatgtgttttcaccgcttgccaatcataatcggtaatactatagatacaggtatctctgcgttgaccgttggtggttaaacgatgattacgtaatatgccatcgagttttgcacctaaacgctcaatcgctctacgactggtttgatttaagatatgagtgcggaattcaacagcaatacattgtagatcttctaatgcatatttaagtaatagatatttcgcctcggtattaatacccgttctttgtacctcttttgcataccatgttgaaccaatctctactcgaggtgtatggttatctacgttcatataggtcgtcactcccaccacacgctcacggcgtttatcaataacggcaaaaggaagcattactccttgtttttgtaattgtcttttatgctcaatatcttgttttaatgtagtgacagaaggaactgtggtaaaccaaagttcatcaggcctatctttagcaatcagttcacgtaatggtgatgcatgctccatgcttaatggtactaaacgtactaaattaccttctaaggtagtccagtctgttatctttctcataggcgattctctaagtcggtgtattaaatagtttcaaggcaagaatactttttatacataacaaatttattaattggtacgcttattttaacggtgattaaaaatagcttaagaatttgtttttgtataaagagaaaagtaacgtcatgagtgtttaacaacagagaatgacagcttagcaacagggcaggataccgatgtcatgttaatctatacttattcgataatcttaatgaagacatagcaataaaataataggtagcaagatgacagacaccaccaacaccaacaccatcgaatgggatgactttttacgggtagaaatgcgggttggcacaattataagtgctgaaataaataaaaaagcgaagaaacccgcttatgtaatggaagtcagcttgggagagctggggactaaacgctctagtgcgcaaatcaccgtgaattatactcctgaagagctaattggtcgccgagttttatgtgtttgcaattttcctattaagcggattgcagggatcaagtctgaggtgttgattaccggggctgctgatgaaaacggtgctatcgttctcgcagaatttaatttacctgtgcctgatggggctcgtttagcatgatctatagctaattgtccttttcttttaacgctcacagcgattttgttgtagtatttatttcactgtgagcgttaatgtgtaaggggatgttttgttattacctgaattacatttgcgatgttatacacaagatacggtatcacatcagcatgagaatatctggcagatcatctttggcttaaccggaacgatggaagttaatttcaatcggcaagattttcttatttctcaacaaaactatttaattatcccacctaccatcgatcatgcttttgctggtcatctcaataataaaaatcttattttagaacttcctgtcacatcacagtggcgactgaatgaaagagggggaatgtttgccttatcacccgcagcaataggattattagcgtgggtacatcaataccctcaagcgccagaacatcattccactctcgcacgtctgctattagcccaaatgaaagtacaaccaagctggggggataaattagatctctggctagaagataaactgcatatgccattaacagcttctgatattgctggtgcattaaacatatcaatcagtacgctacagcgcaaagtaaaagcggaattaggcatatctattatgcagtatgtgatgcaaaagcgactcgctaaatccgcagagttgctcaaatacacatcattaacgattgaaaatattgctttagcggtagggtatgattcacattcggcttttagccaagcttttcgtcaatactttcataaaacccccagtgaatatcgacagtaaacgacttactgataaaaatgctgacttttgatatgtgatttattaattaattttattaatttatttttttattctctatttattgtggataaatagagaacaacaaggttatattatttgtatagtctttttttgaatgtatttcattgattattaatattttttgtcaaaatctatatgtattgctaaaataatattaactaatatttttaaattggatatgtaagtgaatttaataataaaggggcttctttatcctttttttgttttcttttcagcatatgcattatcttttgggtgcagtgttgataatggatatgatattgagtctggtaattataatatttatgtgcaattagaggctgaagtgcaaccttatcagaatttaattgttgatctctctaggcatttaaaatgttggaatagttatggtggatggcaagatgttgaccatatcaatttagaaccagggacgggcttatctgggccactatttaattttagtggttcagtatattggtatggaaatacatattcattacctttaaatagtgcgactaaagttttacatatcggtgatcttacccctatgccgatgccaatgatgttgtatttaacgcctataaataactcacctgcaggaggagtactcattagatcgggtgaaactattgcaactattaatatgtataaaatagcggattgggatggtggtaatcctaaatattttacgtgggaaatagtgtctaaatatgatgttacaatgccaattagtggatgcgacgttagtagccgaaatgtcaatgttaatttacctccttacccaggcgaagcaccggtcaatttaaatatccactgcgcgcaaccacaaaatatatcattttatctttccggacaaaccactaatgatgatacaacctttattaatttagcaggctctgcaggggaagtctctaaaggtatgggagttcaattaatgcgtaatggatatgtaatccctgctaataaagcaatatctttaggtagagttaattcgtcgacttcattaggcttaaaggcaaggtatggtatgactggcgagcgtgtaactgctggaaaagtaaaatcaattatagatgttaactttatatatgagtgaattatttattaatttaatatctatgattttaattagcgtaaatagcaaatggggacagatatactcgcgcaattaaaagcatatataatttgttgttgctatgataatatcacgcttgagttatagcagtatgccaaagcacttttattatcctaaacactttggtgtacataacttgcagagtgaagcaagtaactgctaataacgtattaaattttaaagtaaaattaataatgcatgtgatcttgcgtatgggtcaccactgtaactaaggattttaaatgccaattattactcttcctgacgggagccaacgtcaatttgaaaatgcagtctctgtcatggatgtcgctgcagatatcggtcctggacttgccaaagcctgcattgcagggcgcgttaatggtgagctggtggacgcttgcgaattaatcgagcaagattcacaactggcgattattaccgcaaaagacgatgaaggtcttgaaattattcgtcactcttgtgcccacttattaggacacgcaattaaacagttatggccacaaaccaaaatggcgattggtcctgttatcgaaaatggtttctactatgatgtggatttagatcattctctgacgcaggaagatttagaaacgttagaaaaacgtatgctagagttggcgaaaacagattacgatgtcattaaaaaacgcgtaacttgggcacaagcacgggaaacttttgttgctcgtggtgaagattataaagtcgctatccttgatgaaaatatcagtcaagatgcacacccagcactttatcatcatcaagaatatattgatatgtgccgtggcccccatgtgccaaacatgcgtttctgccatcactttaaattacagaaaatcgcaggtgcatactggcgcggtaatagcgataacaaaatgctacaacgcatttacggtaccgcttgggctgataagaaacagttaaaagcttatttagaacgtttagaagaagccgctaaacgtgatcaccgtaaaataggtaaacaacttgatttatatcatatgcaggaagaagcgccgggtatggctttctggcataatgatggttggactattttccgtgagttagaaacatttgtacgttgcaaattaaaagaatatgattatcaggaagtaaaaggtccatttatgatggatcgtgttctttgggaaaaaacaggtcactgggaaaactacaaagagaatatgttcactacttcttcggaaaaccgtgaatattgtatcaaacctatgaactgcccaggccacgtgcagatttttaaacaaggtctacgttcttaccgtgatttaccattacgtatggctgaatttggtagctgtcatcgtaatgaaccctctggtgcattacacggtttaatgcgtgttcgtggctttacacaagatgacgcacatatcttctgtacagaagaacaaattttaagtgaagtaaataactgcatcaaattgatttatgatgtatattctactttcggatttgaaaaaatcgttgttaagctgtctactcgtccagaaaaacgcatcggtgaagatgctttatgggatattgcagaaacagacttagcaaaagccttgactgataacaatattgaatttgaatatcagccgggtgaaggggcgttttatggccctaaaattgaatttacactttacgactgtttagatcgtgcatggcagtgtggtacagtacagctggacttctcattgccaggtcgattaggcgcttcttatgttgctgaaaataatgagcgtaaagtacctgttatgcttcaccgagcggtgttaggatcattagaacgttttatcggtattctaactgaagaatacgcaggattcttcccgacttggttagcaccacagcaggttgtcgtgatgaatatcacggatggacaggctgattatgtacaaaaactcgtcaaagaattgcaagatgccggaattcgtgcaaaagcagacttgagaaatgagaagattggctttaaaattcgtgaacatactttacgtcgtgttccgtacatgcttgtttgcggtgataaagaagtcgaatcaggcaaagtagcggttcgtactcgtcgaggtaaagaccttggcagtatcgacgttaacgattttaaagaaaaacttctgcaagaaatcagaagcagaagtcttcatcagttggaggaataaggtattaaaggcggaaaaagaattcaatcaacgcgtcagaatcgtatcaatggtgagattcgcgctcatgaagttcgtttaacaggtttagacggcgaacagattggagttgttagtctgaaagaggctcttgagaaagccgaggaagcaggtgctgatttagttgaaatcagtcctaatgccgagccgccagtttgtcgtattatggactacggcaaattcctctatgagaaaagtaagactctcaaagaacagaaaaagaaacaaaaggttattcaggtcaaggaagttaaattccgtcctggtacagatgaaggcgactatcaggtcaaactacgcaacctgattcgttttcttgaagatggcgataaagccaaagtcacactacgttttcgtggtcgtgaaatggcacaccaacaaatcggtatggaaatgcttaatcgcatccgtgaagatttggatgaactggcttctgttgaatctttccctaataagattgaaggtcgtcagatgatcatggtgctagcgccgaagaagaaatagttaggcaattcaagtaatagcgtcagtctttattgactgactgctattcgccttattattttatgttattaacaatgcgaagtggattatagaaatgccaaagattaaaacagtacgcggtgcagctaaacgctttaaaaagactgcaggtggtggttttaagcgtaagcacgctaacctccgtcacattctgactaaaaaatcaactaagcgtaaacgtcatttacgtccaaaaggtatgatctctaaaggagatttaggcctggtcgtagcttgcctaccatacgcataagtatcagtttttttaacagaattatagacattaggagtgttatatggctcgcgctaaacgtggtgttatcgcccgtgctcgtcacaagaaaattttaaagcaagctaaaggttattacggtgcacgttctcgtgtatatcgtgtagctttccaggctgttatcaaagctggtcaatatgcgtaccgtgaccgtcgtcagaaaaaacgtcagttccgtcagctgtggattgcgcgtatcaacgcagcagctcgtcagaacggcatgtcttacagccgtttcatcaatggattaagaaaagcatctattgaaatcgaccgtaagatcctggcggatatcgctgtattcgacaaagctgcatttgctgctttagttgaaaaagcgaaaggtgctctggcttaattaagtcaatggaagagggagttaactccctcttttattttgtctaaatttgtggcttaatggtaaaattcaataagttacacataatgagaatgtctcaatgttaaatatcgcttttttccgcttctttttttactttagcgcctaattttgggggcttttgcgcgtaagaaaagaaacgaaaagtagcgccggagcctccattttggaggcttttttgttttcagtactcaaacttgagttcagaaatcaaaagggcaattttttaatcgtcatcattgataacaactaatagacctcatcaggtcaaaggaagaggaaacgatgccacatctcgctgaactcgttgctcaagctaaagcagctatcgaagaggcacaggatgttgctgcgctggattcggttcgtgttgaatacttggggaaaaaaggtcatttaacgctccagatgtccacgctgcgcgacttacccgctgaagagcgtccagctgctggagcggtcattaatcaggcaaaacaagaggttcagcaagcactgaacgctcgtaaagaacaaatggaatcagcgctattaaacgaacgtttagcggctgagaaaattgatgtctctttgcctggacgtcgtattgaaaatggtggtctgcaccctgttactcgcacaattgaacgtattgaaactttctttggcgaattagggttctctgtggaatcaggccctgaaattgaagatgactatcataactttgatgcgttaaatattcctgctcatcaccctgcaagagctgatcatgacactttctggtttgatgctaaacgtttattgcgtactcaaacctctggtgtacaaattcgcactatgcaaaataaacagccaccgatccgcattattgcacctggccgtgtttatcgtaatgactatgaccaaactcatactccaatgttccatcaagttgaaggcttaattgttgataaagacattagcttcactaatttaaaaggaacactgcacgattttctgaaaaacttctttgaagaagatatggaaattcgcttccgcccatcctattttccatttacagagccttcagccgaagttgatgtaatgggtaaaaatggcaaatggttagaagtcttgggctgcggtatggtgcatccaaatgtgttgcgtaatgtaggtatcgatcctgaagtttattctggttttgctttcgggatgggtatggaacgcttaactatgttacgttacggtgtcaccgatttacgttcattcttcgaaaatgatcttcgtttcctcaaacagtttaaataaggtgggattatctcatgaaattcagtgaactttggttacgtgagtgggtaaacccagcaattagtagcgaagagctttctgaacagctaaccatggctggccttgaagttgatggtgtagagcctgttgccggtgattttcacggtgttgttgtgggtgaagtggttgaatgtggacaacacccaaatgcagataaactacgagtgacaaaagtcaatgtcggtggtgagcgtttattggacatcgtgtgtggtgcgccaaattgtcgccaaggcttaaaagtcgctgtagcaacggttggggcggtattaccgggtaactttaaaattaaagcagccaaactacgtggtgagccttcagaaggtatgctgtgctctttttctgaattagctatctcagaaaaccatgaaggcattatcgaattacctgctgatgcacctatcggtaccgatattcgcgaatacttaaaattaaatgataatgcgattgaaatcagcattacaccaaaccgagcagattgcttaggtattatgggggttgctcgcgatatcgcggtcattaataaaatgacatgccaactccctgatatgtcaccaattgcagccacttcttcagcgacatttcctgtgcgagttgaagcaccacaagcttgtcctcgctatttaggtcgtgttttcactaatgtgaatgtgaaagcgaacacaccattatggatgcaagaaaaattacgtcgtggtggtattcgctctatcgatcctatcgttgatatcactaactttgtcttacttgaaatgggacaaccattacatgcgtttgatcttgaccatgtcgatggggctgtggttgttcgtatgggcaaagagggtgaaaaactaactttacttgatggtaatgaaattaccttaaaagatgatgtactggttattgctgatgaaaaacaagcattaggaatggcaggtatttttggtggtgaatcttctggtgttaatgaagaaactaaaaacgtatttttagagtgcgcattcttctctccattagcgatcaccggccgtgcacgtcgttatggtttacataccgatgcatctcatcgttttgagcgtggtgttgattcagagctacaatatcaggccattgaacgagcaacgaaattattactcgaaatttgtggtggtgaagtgggtgaaattattgatgtcaccaatgacagctatttaccccatgttgctcctatcaaattaacacgtgcaaaattagaccgtttattaggtcatgttattgatgatgaacaagttgttgattcgttaacacgtttaggttttggcgtcaccgttgaaaatgacgggtggttagccactgtgccttcatggcgttttgatgttgaaattgaagaagacttaattgaagaagttgcacgtatttacgggtataacaatattccagatgtacctttacgtgccgatctgattatgacagaccaccgtgaagcggatctgccattaaaacgtgtaaaaaccatgctggttgataatggattccaagaagctatcacttatagctttgttgatccgaagatccaaagcttactacatcctaatgaagaagcgttgatcttacctaacccaatttctgccgatatgtcagccatgcgtttgtcattgttgaccggattattaaccacagtggtttacaatcagaaccgtcaacaggctagagttaggttatttgaagcaggtctgcgttttgttcctgataatcaagcagaatatggaatacgtcaggaacttatgctagctggtgtgatcgcgggcaaccgttatgaagaacattggactttagagaagcaaactgttgatttctttgatttgaaaggtaatattgaatcaattctggaattgacaggccagttagatgaaattacatttaaaccagccaatcattcagcgctccatccgggacaaagtgctgagatttatctgagaaatgaatatattggctgtattggtgttgttcacccagagcttgaacgtaaacttgatttaaacggccgtacggtagtattcgaaatacgttgggacgcaatcgcaaaccgcaatttaccgcaagcgaaagctgtttcacgtttcccttcgaatcgtagagatatcgctgtagttgttccaaatgatgtggctgcagaagatattttagctgaatgtaagaaagttggcggaaatcaaatagttggcataaacttatttgacgtgtattgtggtaagggagtagcggagggttataagagcctcgctattagcttaatcttgcaggatatcgagcatactctggaagaagatgagattgctgccacagtcaatacctgtgttgcagcattgaaacagcgattccaagcatccttgagggactagacctatggcgcttacaaaagctgaaatggcagaaaatctgtttgaaaaacttggcgttagcaaacgcgatgcaaaagaccttgtagaagccttttttgaggaagtgcgtcgttctctggaaaatggagaacaggtgaagctgtctggattcggaaactttgacctacgtgataaaaatcagcgcccaggtcgtaacccgaaaacaggggaagatattcctattacagcccgccgtgttgtaactttccgcccgggacaaaagttaaaaagccgggttgaaaatgcgacaccaaaagagtaatacttaaacaccaaaacggctttctattgaaagccgtttttttttcgacttacttctacgatttactccttctatttttcttttgcttatctgtgataagcgcctaatagtcattttattgtttaaataagatgtgcttgaggggaataatcattggtttaaaattaatcatactggaaggtttatttccttaggatagaaaattatattttcttcattgaaagggactgtgttatgttgccctacatttattagcaatatatttataaaaatagcgtaatttatgggctatttactaaacaatatgaataatcaatatgatgatccgcttaatcaattacgacacaaacagcaaattagtgataagctaaaactcactttgctggtgttagttttatttgttcttattgttatctcactttcagccggtgaaatttggttattccccaataaatggctcactgaagaagctagtttatttatttggcaaattaggcttccaagaatattggctgtgatgatggttggcgcaagcttagcgattgctggtgccattatgcaggcaatctttgaaaatccgttagcagagccgggacttttaggtgtaagcagtggtgcgggtgtttgtgttgtgttactgattgttttccaattaggaactgcatactggttaataagcagtgccgcgatattaggggctttggggatcacctgcttattaatgtttttctcacaaataaaaaaactatctaatgctcaattattattaataggcgtagcattaggggtattagcaagtgctgttatgacttggctggtctattttagctctgcgttagatttaagacaattaatgtactggcttatggggagctttagtggcattgactggcgtcaccaaatattattttgggcattacttccaatcatcacacttcttatttggcaagccgatattttaaattacctttctctggggagttttgaagccaaaaaactcggcatttctgtgattatatggcgtaattggtttattttaaccgttggtttattaattggttttagcgttgctctagccggcgcaattagttttgtcgggttgattgtaccgcatttattacgattgtctggtatcacacattataaaaccttgttaccgggctgtgctttaacgggagcgagtttactgatattcgctgatttaatatcaaggctgatgttaaatggcgcagaagtccctattggcgtgataactgccaccttaggcgcacctctttttatttggttattagccactaaacagatggagcgcttataatatggcacaattaaaactatataaattagctgtcaataaaagactatatggtattactgaacaagttaatgatggcgaacgcattcatttaattggcgcgaatggggcgggtaaaagtacgttgttaatggccattgctggtgaagtttcatacgttggaaatatatttttaaacgaaacttcaatgagggattataaaattgccgaactttctagaatacaaagcgttgttagacaacaatcgttagctttgccatttatgccagtgtttcattatctttctttatcctatcagttatcaaaaatggatattcaagaattgaatgcactattaagcgattttcaaatcaataaattattgtcaaaaaatattcatcatttatctggtggggaatggcaacgcgttcggattgttgccacttttatacaattatggtcaagcgatgatttaacaggaaaattaatgatgcttgatgagccgacaaataatttagatattgtacaacttactttattggataaatggctagataaattttgtctacaaggtggcagtattattatgagtactcatgatttgaatcattcttatctaaaagcagataagttatggtttatgttagagggaaaaataatcaactcaggtgactcagcacttttgttggatgaaaatttattatctactacatttaatactaagattagatgtaatagatcagcaaatagtgtaatttggcaagtaatagagtgatgttattgagtcagagtctgcgcatcggaaattattaagccttctttaaggctttcttaataacaacgggtgctgtgaaacagcaaattgtatataattagtttttattcattcattaattaggctacatctttatgagtcactttcttccattctcccgtcctgctatcggggatgaagagattaaagcagttgaaagcgttttacgctccggctggatcacaacaggtcctcaaaatcatcagctagaacaagatttttgtgaaaaatttggtagcaaacatgctattgcggtttgttctgcaacagcgggtatgcatgttgttttgatggcgatgggaatagggcctggtgatgaagttattacaccttcccaaacttgggtatcaactatcaatatcattacgttattaggcgcagagccagtaatggtcgatattgatcgtgacacattaatggtcagcgctgaatcggtaaaaaaagcgattaccccaagaaccaaagcaatcatccctgtgcattatgccggagcgccttgtgatcttgatgcactcagagcggttgctgatgaggcgggcattcctctgattgaagatgcagcacatgcgataggtactcgatataaagatgaatggataggtgagaagggaacttctattttttcttttcatgccattaaaaatgtcacttgtgccgaaggtggattagttgttacggacgatgatgaattagccaatcgagtccgttgcttaaaatttcatggtttgggtgttgatgcttttgatcgtcaagtccaaggacgtaaacctcaagcggaagtcgttgagcctggttataaatataatctctcggatattcatgctgctatcgcggtagtgcaattaagtcgcttagaagaaatgaatgctaaacgtgctgagttagttgccctttatcgtgaaaaacttcaagattcaccattggaaatgttaagtgtgccggaatatccacacttacatgctaaccatctctttatggtcagagttgataaaaatgcctgtggtatcgatcgtgatacatttatggaaaaactcaaacaaaaagagattggtacagggcttcatttccgtgctgcgcatacacaaaaatattatcgtgagcgctacccttcgttatcccttcctcaatcagaatggaactctgcaacgttatgctcgctgccgctgtttcctgatatgagcaataaagatgttattcgcgttgtcgatgcgatcaatgaaattctttcggagcatatctagtgtcaacatttgaaaaaatcaataaagtatcagtcgttattcccgtttataacgaggaagagagtctcccacagcttttagagcgaacaatcaaaagctgtaaacagttagaacaagagtatgagctgatccttgttgatgacggaagtagcgataattcagcaaaaatgctagaagaagctgccaacattgaagataaccatgttattgcgattattttaaatcgcaactatggtcaacactccgctattatggcgggttttaaccaagctgatggggatttagtcattaccttagatgctgatttacaaaacccaccagaggagatcccccgtttagtggcaaccgcagaagaggggtatgatgttgtcggaactcgacgccgtaaccgtcaagattcgtggtttcgtaaaacggcctctaaaatgattaatgccatgataaccaaggcaacaggtcgttcaatgggggattatggttgtatgttaagagcatatcgtcgtcatattattgatgcgatgttgcaatgccatgagcgtagtacttttatcccaattttagcgaataccttcgctcgtcgtacgattgaaattgaagttgctcacgctgagcgtgaatatggtgattcaaaatacagtttcttaaaactcatcaatttgatgtacgacttattaacctgtctgacaactgcaccattacgtttattaagtgtcgtaggtagtgtgattgctgttgccggctttttacttgccgtattattgattgtactacgacttattttcggtgcaatttgggcggcagacggagtgtttacactctttgctatcttattcatgtttatcggtgcgcagttcgttgcaatgggtctattaggtgaatatataggccgaatttataatgatgtaagagcgcgtcctcggtattttatccaaaaagtggttggcgttaaaaaacccaacaaaaatcaggaagaagactaatgaaagcaatagtatttgcctatcatgatattggctgtgttggtttaaaagcacttgaaaaagcgggtttcgatattcaagctgtatttacccatactgacgatcctaacgaaaatcatttcttctcatccgtagcgcgtgttagcgcagaaatgggattaactgtgtttgctccagaaaacgttaatcatccattatggattgagcgtattcgtgagatgaagccagatgtcattttctctttctattatcgccatatgctaagcgatgagatcctgaatttagcacctaaaggtgcatttaatttacatggctctttattacctaaatatcgcggtcgtgcacctatcaattgggccattgtcaatggtgaaactgaaactggtgtcactttacataaaatgacggctaaagcagatgctggtgatatcgttgcacaagaaaaagtaacgattgaagatactgatacttcattaattttacatgaaaaagtcagagaagctgcggcgaaattaatggctcatacgttaccgcatatcgcctcaggtaactattcaacaacagcgcaagatgaaagccaagcaacttattatggccgtcgttgtgctgatgacggtttaattgactggaatgcagatgctaaaacggttcataatttagttcgcgccgttactgaaccatacccaggtgctttcactttcttaggtgagcgcaaaatgattatctggcgtgcacgtccagtggcagataaccaaggtaaacgtccgggtactgttatttcaactgagcctttagttatcgcatgtgcgaaaggtgcaattgaagttatcacaggtcaaagtgaaaatggtctttatgttcaaggcagccgtttagccactgaaatggggatcgtgacagatgtacgcgttggaccaaaagcaacagcacaagtgaaacgtcgtcaacgtgtactgattttaggtgtcaatggctttattggtaaccacctaaccgagcgtttattaaaagatggtaactatgatatctacggtatggatatcggttcatcagcaattgaacgctttattggtaaccctcgtttccactttattgaaggtgatgtcagcattcatacagaatggattgaatatcacatcaagaaatgtgatgtgatcttgccattagtagcgattgcaacaccgattgaatatacccgtaatccattacgtgtatttgaattagattttgaagagaacttaaaaattgttcgttattgtgttaaatacaataaacgtattattttcccatccacatcagaagtatacggtatgtgtgatgataaagagttcgatgaagataattcacgcttaatcgtcggtcctattaataaacaacgttggatttactctgtttctaaacagttattagaccgagttatttgggcttatggtgctaaagaagggctgaaattcactttattccgtccatttaactggatggggccacgtcttgataacttaaattcagcgcgtattggtagctctcgtgcaattactcagttaattttgaacctagtggaaggttcaccgattaaactggttgatggtggtgagcaaaaacgttgtttcactgatattaatgatggtattgaagcattattccgcattattgaaaatcgtgataacaaatgtgatggtcagatcatcaatatcggtaacccaactaacgaagcaagtattcgtgagctagcagaaatgctgttagattgctttgaaaaacatgagttacgcggtcacttccctccatttgctggcttcaagaaaatcgaaagtagcagttactacggtaaaggctatcaagatgttgaacaccgcaaaccaagcatcaaaaatgctgagcgtctattagattggaaaccaactatcgaaacacgccaaacggtagaagagacattagacttcttcttacgtggtgcagttgaagagttaggtaataagtaatgaagaaagttggcttgagagtcgatgtggatacttatcgaggtacaaaagaaggtattccacaattgctggatgtctttaacaagcataacattcaggccagctttttcttcagtgtcggtccagataatatggggcgccatttatggcgccttttaaaaccgaaatttctgtggaaaatgctaaggtcgaatgccgcttcattatatggactggatattctattagccggtacggcgtggccgggtaaaaaaattgccaaaaatttaggctatttgatgaaacaaacccaagatgcggggcatgaagtcggattacactcatgggatcatcaaggttggcaagctaaagtaggccgttggtcaacagaagaattaatgcaacaggttcgtttaggtgtagaagcactggaaaaagcacttgaaaaacctgtaaaatgttctgcggttgctgggtggcgtgctgatgaacgtgttctaatggttaaagaagctttccaatttgactacaatagtgattgtcggggaacgcatccatttaggccagttctagaaaatggttctatcggtacagtgcaaattccagtaacattaccaacttatgatgaagtggtcggtactaaggtaaaggacgaagattttaatcaatttattattgatgaaatcaaaaaagatcagggtatacctgtttatactattcataccgaagttgagggaatgtcaaaagcggctcaatttgagcagttattggcaatgattgcaaacgaaggcatcgaattctgtccattaagccatctactaccacaagatatagacatgcttccgatgggtaaagttgtccgatctgactttccaggtcgagaaggctggttagggtgccaacaagaggtctaacaaaactatgttgaataaccgggcgagtaaaatcggggccatcctcttggctcttttttttgttcttacctacttatttccattgaacagccggttattatggcaacctgatgaaacacgttatgcggaaattagccgtgaaatggtggtgagcgggaactggattgttccccatatgcttgatatccgctattttgaaaaaccaatagcaggttactggattaataatattagccagttaatatttggccacaccaattttgccgtacgctttggttcagttatttctattctattaagtgcgttacttatttatttattagcacgaatgatgtggcgtaatcgccaagtcgcttttgtggctagcttaatttatttatccatgtttttggtgtttagcgtcggaacttatagcgtacttgatccgatgttagcgctttgggttactgcaagtatggtgtgttgtttttgggcgttgaaagcaaccacggcaaaaacgcgtatactggcatggataacgctaggtttagcttgtggtatggcctttatgaccaaaggctttttggcattagctatccctgttattgtgatgatccctgtaaccctttaccaaaaacagttcactcggatgttactctatggtgtgcttgctgttttaagtgcggcgttaattagcttgccatgggttttagcggtggcgaaggctgagcctgattattggcattatttcttttgggttgagcatatccagcgtttttctggtgatgatgctcagcatagttctcctttctggtattacatccctataattttactgggtgttattccttggcttggattattaccaggggcactaactagtgcatggaagaagcgccgtaagcgtcctgaactctttttcttactatgttggtttgtagtacctttcctattttttagtatcgcgaaaggtaaattacctacttacatgttgccatttatgggaccattggcgatgttaatggccaaatacggtgtagactgtgctagaaaatttaaaatgaaagcactgcgcattaatggctatattaatatttttattggtgtcgctgctgttgttgcaatattaattattcaattggtttcttctaaacctatctatatgccttatgaatggtcaaaatgggtattagcgatagtcgctttctcattatggggcatcattggttatctctgctctacattaaatggtaaacattggctatgggcagcctcttgctctttaggggtaagcttatgtattgggcaagccattcccaatagctctattgatggcaaattaccacaagagtttattcgccaaaatatcgataccctcaatgcgagcaaatatatagtcagtaacagcgttggtgtgggggctggattagcttgggaattgcaacgtagcgatatctacctttatgagagaacaggggaattaacctatggaattgaatatccagattctcaacatagattactaaaacctgaaagttttgagcaatggttagaaaatgccagaaaagaaggtaatgtctctgtggtgatcacttataaagatccgaagaaactggcgcagatgccacgacctgaagagttagtgacgaatcgtcgtatggctattttgacctatgagaaacgtaagtaatggccttttttttgttacttattgttagtttgctaacctgtattggccaagtttgtcagaaacaagcagtggtgagttggcaaaataattcaaccactaaagccagaaagacgattttctggcttattactgccatcgctatgctaggctttggcatgttattttggttacgtttactgcaaatcctcccacttagtattgcttatccgatgttgagtattaactttattgtcgtcactttgataggccaatttatctataaagagacggttaatgtgaaacattgggttggtattgcctcgattatgttaggtattgtgttaatgagtatgcagtcatgaaaaccggttacttatgggccatcgccagcgcattattagtcacagttgcacaactgctgttaaaaataggtatgtcagaattacctgatctgcaattagaaaaacagtggtttgatcttcattggttatgggcaaacataatacctatcagcgttgttttcgtgggactgattggctacgtactgtcaatggtttgttggttattgactttacgtacaatccccctaaacaaagcttatccactcatcagccttagctatgtctttgtttatattctcgcggtggttttaccttggtttcaagaaacactgtcgtggtctaaaacaataggtatcatttttattatgctaggtgtttggttaataagccaaaaaacggagcaaacaacatcgcattagcttaacttagagagtgttattttctctttaaagtgagctattgtgcgattgacactatcaatgcttgtgtattcaccttcaatcacttgtttttacgtaaaaaagcagatagattttaaatctattgtcaataattgggtggatgcaatgagaaagcctactttttattctttcttactctgtattattctgctagctggatgctcatcgagtccctctaagcgtctcccacccgcgcccccgttaaaaacgcaactttctgatcctattatggtcattgtgcaattaaaatctcagctagagcaatggtatggtacgccttatcgctatggtggcatgagcccatcaggtattgattgctcagggtttgtgtataggacttatagtgatcgttttgatatacaactaccaagaatgactatcgatcaaactaaatatggtacacaaattagtaaaagtgatttgatgcctggtgatttagtatttttcaaaacaggaggaggggataacgggcttcatgttggtatttatgatactgacaatacctttattcatgcttctaccagtaaaggcgttattcgttcatcattagataatgcctattggaaaaaaactttctggcaggctcgtcgattgtaattttgtgccattgaaggcgctaacctactgagtgttatgctatcttatagctaacttttttcatatagggatatcttatgtcaggcaaattgcgtctacttctttctgagtcttatgatccatggtttaacctcgcggttgaagagtgcatttttaaacagatgccagctgatcaacgagtcctttttttatggcgtaatgataatactgtggtgattggtcgagcacaaaacccatggaaagagtgtaatacccgaaaaatggaagaagatggtgtgaaattggcgcgtcgctcaagtggtggcggtgcagtatttcatgatctaggtaatacctgttttacttttatggcaggcaaacccgaatataataaaaccatttcgacgcaaattattttagatgggttatcgaaagccggcatacaagcaacggcatcaggacgaaatgatttagtcgtaccattggctgatggtgaaagaaaaatttctggctcagcctataaagagacaaaagatcgtggttttcatcatggtactttattaattaatgctgatttatctcgtttagctaactatttaaatccagatccgaaaaaactacaggcgaaagggatcacctcggtgcgctctcgtgtcactaatttagtggaattaaaacccgatataactcatgaaaagttatgccacgcgattactgacagtttttttgactattatggtgagcgtgttgaagctgaaattatttcaccacaaaaattacctgatttaccgggttttgcagaaacatttgcaaaacaaagtagttgggagtggaattttggtcaagcgcctgcgttttcacatctattagataatcgctttaaatggggtggtgttgagctgcactttgatattgaacgcggtacgattattagaagccaaatttataccgacagtttagatcccgcaccattagaaaagctatcgcagatgttagttggacagcgttatgcttctggatcgatgaaaagactattagcgcaattaatagagcagtacccaaataaccaatcagagcttgaagagctgcaacagtggcttgttcatgcgctttcttaattgattattatctatttaagaaaacgactgacaataaaatggtttgatataataaacaaagcgggaaaacatgatgttttcccgctttgttttgtcagtcaatacttctggctatattagctattttcacatgacataaaacgacgtgtatctggtaactcaccatgttctctaaatttagctggtgtagtgttgaagtgttttttaaagatacgagtaaatgttgcttgggaactaaagccatacatcaaagcaatatctaaaatggacatgtctttttcttgtaaagactttgctgcttccaataagcgacgtttacgtacatattcgcctaatgtgcaacctttaaaatctttaaaaatacgttgcaaatgccacttggagtagccacttttatttgcaatcgtatcaatctttataccctcattacgttgtaactgagtttctaaccatttcagaatatcattaacgacattttcagccataaaaacctcccacaataggtggggacatagtgcccaattaaatagaatagtaacgtatgttatttgtaatctattttaagcatagaggaaataataggtaggcaaaaagtgctttttatgattgataatcattatcaaagcaataggagtaagtaataaacaatgattgatagatagtctatcaaaaagaaagtgataagttttataaaattggcgcattttattttattgaatttactctattatttaacaatcgctaaattttgttatagctgttgttttgcagactgttatattttttgataaaaaatcaattaaatcattgatgaagatgtatttcaaatacaattttattggttgaaatcgtttttttaatgattaatatttctaattaaaataagtattgatacttggttgtttaaagtgcttttatcaatatataaaggctaacataaatctgtcaaaaaacggttattgcatagggggaattgtagactggagcagaagataaaagcagatatgctaaataagctcactcgcagacaacgggagacactctgcgagtgagacgaaagattttttataataaaaaatgctctcttacaatttcacgaccaatttcaattgatgctgttgcggccggagaaggggcattacatacatgtaatgaacgtttgcctttaacaaagtgaaaatcatcgactaattttccttcgcgagttaaagcttgggcgcgtacacctgccgggcctgggtgaatatctgcttcacgtagagcaggaataagcttttgtgcattttgggcaaacagcttacgtgaataggaacgacgtaattcggccatcccttcacctaaataatttccggctattttccaaaatcctttataggttagtacttcagtgagatcttttaagtcaatatcacttttcttgtagccttcacgtttaaaggctaatacggcattagggcctacgtcacgatgcccgttatacatacgtgtaaaatggacacctaaaaatgggaaatcaggattcggcacaggataaataagatgattaactaaataatttttatttgagttgagcataaaatattcaccacgaaagggaactatcttcatgccggtatcgtagcccgccatttttgctacccgatcactaaataatccagcacaattaatcagccactttgcggtaaattgtgttgtagatgtggtgactgttaccgtttcgtccgtttcattaatcgcatttactgcttggttaaaggcaaatactccacctcgagcttgaatgatttcaacgtgtttggcggcaatttccggataattgacaataccggcatcaggaacaagcaaagcagcaataccattaacataaggctccctggcttttagctcgctctcggtcattttaattacttcaaggccattttgtattccacgttgatagatattttctaatgctggtagctctttttcatcagttgccacaatcaccttgccacaacgatcgtaatagagatgatgctgtttacaaaaattgtaagtcgtgatgttaccttgcttagcgagtcttgcctttaagcttcctggtgtatagtaaatccccgaatgaacaacattgctgttatggccactttgatgaacggcggggccagattccttatcaatcaccagtactttaagctcaggttggctttcttgtaatgcactggcaacccctaatcctactaatcctgcaccgatgataattacgtcataagtcataatactacccatataatccagtataagagttaatttttttcttgttgtaaacgctttaactttccacgtacattggctaaatgaagacgcattttgtggctagtttcatcactatcttgttgtcttattgcttcaacaatagcttcatgctctgcaataacacgctcagtttcggcaatacgtcctttattttggcttaaggaatacatcaatacgccaagataaagctcatgtaagttatcgaggatgcgcacgaaaaaaggattatgtgaagcaaccataatggcacgatgaaattgataatcttcttgatgaccaatgttgttgtttttctgcgtggctaagataaaggcctgatgtgcttgctctatcgtcagcaattcttctggtgttcgacgtaaagcggcaatggctgccgcttcatgttcaatgacctcacgcatttcaagcagtgattcaatttcttgaggacaagcaatttccatcacaataggttcgtatttactcaagatagagtggtcaataacgcgtctaccgcctccttggcgtgacgtaataatgccactcgcttctaatacccctaatgcttctctgatgggaactctgctaacgccaaaggcgtcagcgagtacattttcagacggtagtttttcaccaataggataggtcccgtcataaatattttgcttaatttgatcaagaatttgttgcgacgctttttggcgtgagatcttttttatcatctagttttctccagatacttgccctacattgaccagctgttttttagagcgcaacagatggaaagcgccagtaagtaagatcaacgccatacctaataaatcggtatatagtccgggcttaatcattaaaatagcggccgctgcaaaggcgatacgttcaaaccatgttgttttgattatccaaaaattcgcagtggcaatacttagtgcataaattcccactaatgcactaatgaccattaacccgatagagataacacttaaattatcaccttgcatcagtaatgcagggttataaaccaaaataaaaggaataataaaaccagggagtgctaaacgtaccgcatcccatgaagtttgcatcggatcggctctcgcaatacttgctgccgtatagcttgctagggcgaccggaggagtaatattggataacgcgccaaaccagaagacaaagaaatgagccgctaaaggcatcacaccggctttaattaaaataggtgacactgtaacggcaaccacgatatatagagcagttgatggtaagcccatacttaatacaatacagactaacatcacaaccagtaagatcatccataatgtattgtcagtcatagagacaatattaaatgctaaggtcgcaccgataccggtcatggtaacaacacaaataatcacaccaatggcagcacaagcgatagtcacttgtaccgagccacgagccgcttctgctaaagcatcagccactttagttaatgtcattcgtaccgttttatcaggtgttagccagctggcaacaataatggttaagataccaagaaaacccgcataaataggggttttacccattaatagcgtgccaattacaataattaaaggtaatagtaataaaccgcgtgcttttaataccgctttaacttgtggaatattctctttgctaagtccttttaaaccttgttttttcgcttcaatatcaattgccatgatcaaggccgcgtaatagagcaatgcaggaataatcgcggcaataacaatcgtggtataagaaattcccaaaaagcccgccataataaaagcagccgcacccataatcggtggcatgatcattccacccgtagatgcagtagcttcaacggcacccgcaaaacgtgatgttaagccaatatttttcattaatggaatggtaaaggttcccgtagtggctacgttggcgaccgcgctaccacttaatgaacctgttaatgctgatgaaatgacggcaacttgagcaggccccccacggcgacggccggccatagctagcgctaaatcattaaatagtgctgtggcaccactaacacttaaaaacgaaccgaataaaataaataccacgatagcggtagaggcagtagagagtgtaataccaaaaataccttcactggtcataaataaacgatataacagtctctctacagaaaatcctgcatgaccaaaaatacccataaaatattggccaaatagggcatagataatggcgaatgtggctaggctaggaataaaatagcccgttgttcttcttgctgcttcaaaaagaacaataatgccaagaattgccatcgcataatccattgtgttgggaatactttttcttaccacatggagatcaacatagttaaagaaaaaatagccatagctgattaatgttaaagcgataaaaagataatcccagccattaaatttcgcggtagaaaatcgtttagagaatggaaataaaataaaaccaaggatcaaaataccactaagaaaaatagtattacgataaaactcttgggtgttggataaggcattagagtaaatagcatacaacgaaatgaatatcgccagcgtggtggtgatttttaaatagataccggtaaggtgacgagtgcctgagctagcttctttatctaatgctggtggctctaccggagttaggtggtcattattagtcataactcactcctgttatttattattagtttgcgtttgagcttcaggtggaattaaatagtcagggatatctaatccaatttctttgtaataacgataagctccaaggtgtaatggcacagaaacaccttttaacgcattttcggtggtgatgtattttgcagcactatgtacttgatgaacttctggtaagttttcaaacatggttttagtcaattcataaactaactggtcatcaatacttgtggttgtcattaagatattaggttgtgcaatggtgtttactttttctgcttggcgagggtaggtatttgctggtatttcaaagcgaaaccaagagttagcaatatgattaatatcatcaagttgcttatcagtcacttcaagtaatttggcattaacaccactggcatacatatcggtaaccgcagaggcgggaacaccagcaggtaatgctcccccatcaaggcgtccatcacgcattgctgaaacggtatctccataaccaagatattcaggagtgatctcttttttagttaaattcacacctttaagaatgataatggtcgattgttcagtgccactggcttgtggcccgacagagaagctggtggcacgaatatcatccaatgttcctgtttttactttgtcattcattaagacaaagtgctctacatttggccaaagcattgatatagaacgtagatttttttctggtttgccttcaaaattacgtacaccttcgtaagcttccacagctaatagactttgtagaatagaaagctgagcttcgttttgttgcattaaatagatattttcaattgagccagcagaggactgccctgtgacttgtattcctctatccttgaggtgggtgctccaaacattggctaaaccgactcccatcgggtaataagttcctcctgttgaggccgttgctacagagagaaattgcttattggcattctcttttttgccgatcattgctagtgatacaacagcaataacagcaacaataccgatggcaagctttgtttttcttattctcatgatgttgttcctgtacataaaaacgcaggtgaatatttcacatcaacttgtatacaacatgacaacttttataggtaaaggaaggttacgaaattgtgaactgtgttgattaatttgatacgtgaatgtaacaaattgtgatcatgatggtaattatgtaaattatatccataatcaaggggtttttatcaagaaggcagagaaaatatcgataacttggggtatttgaaaaataattcactaaaaaataaattaataatagattttctaaaataaataactatttacattaaaggaataaataagagcagataggggcgagaaaacaataattaacgggtatggctaacaaataaatatcaaaattagtcaattaaagataataaataattaaaaattattattttataatgagatggagattacgccattggctattaaaataaatactcctgaccacactaaggctgaaacagtacttgttagataaataccataaatggggagttttaataaacctgcgctaaaaggcgtaaggtagcgaaacacagctaaaaagcgtgaaataaaaagaataaagaatgctttattttttaacagttgttgtatacgtaagatctttgtttgatagcgggtaacccatttatttaagcgagggaaataataaatggaacgccctaactgataactcactatagatcctaataaggcacctaaactagttgctaaccaaagtaaaataggcgaatggaagggcaagcaaaccccaaatattaagatcagcattaacgatgcgggaggtaaaaaggatgaaataccaatagtagattttcccgcagtgagcagggtaatagtaaaaaataaagcgataggagaaacatgacttaatgtgtcaagcattgaatggagtatctccattttattctcctttgataatattttgcccctttagtatagagtgcatctttataccagactgtccgttagcctagcaaaatttaatggtcagaaaaagtaagtcaagagcttgtaaataaaatgcccctccattctaatgactaatccgttaactggaggggcttattactaaataattaaattataattaatgtgcttcattaatttatcgttatcacgataatcaacaggaatggctaacacagcaggaccatcaacagctatcgctttacgtaaggtttcacgaagttgagatgcgcactcaacagaaaatcctttagcaccaaaagattctgcatagcgtttaaaatcaataggaccaaattttacgccagaaggacggccatattttacctcttcttgcatctccaccatattataagcattatcaacccagataatatgcaatatattggtattaagacgaactgcggtttctagctccattgaagattgcataaatcccccatcaccagaaacagagataattttatcgcaaggacgtacaaaagaagcgcctattccccaaggtaatgcaactcccatggtttgttggccattagaaattagcatttgtctcgctctaaaactataaaggtaacgtgcaagccaaatatgaaaactccccatatcaatacaaagagtgacatcgttatcaatgatatcttgcatttcatgtatgatagttaaaggatgaataggtgtgccttgtctaaaataactattttgttgcaaaatttccctttgctgacgtattttctctagtattccttggctctgattagacaattgtaattttgaattaggctggtgagttaattgttgcgttaacttatccagtgttaatttaatattgcctgttaattctaaggcagggcagtaagctaaatcgatttcagcttggatctcatcaatatggataatattggcattatgactgttccataaggaaggctcatactcaatcgggctataacctaaagtgataactaaatcagcgtgtgccagtaattcatcccctggctgattattaaataagccaattcgtccggcaaagagtggaaaatggcgatgagcaatagccccggcagattgataagtacctacaataggaacaggaaaaatatcaaggaaattttgtaaggcaagagcattttccggatcgctggcttgaagccctattaatatcacagggtttttcgcttgtaataataagctgatcgcttcttgaattgcactatcactcgcggcacctaaattaggtttggatttaggtgttaataacgggctatctacctcattattgagtatatccattggaaaggttaaaaaagccgagccgggacgacctgactccgcatgacgaaaagcattggctaacgtctctgaaattgattgtgaagaatcaacttcagcacaaaacttagtgattgggttaaacattgttactgtgtccatactttgatgaaccagtttaagtctatccgtagatttaactgagcctcctaaggcaactagaggatcaccttctgatgtagctgtcgcaatgcccgttgctagattagaacaaccgggaccagaagtggctatcgccacacccgctttaccggttaaacgtcctaccgcacccgccataaaagccgcattggcttcgtgacgcacaacaatagttttaattgttgaatcaaccaaagaatcaaaaacacggtcaattttggctccggggatcccaaaaacttgtttaacaccatgttgttctaattgcttaaccaccaagtcagcaccgcaattccaatgatgagagttcataaaaccttctttaagtttgcaagtgaatgaataaaaacagaatgacctttaggaatgattactttcagttttcggcttgttctattgcctgatgaaggtcatcgggcattaaattagcttctaagaatgttgattgatgaggtaagtcaatagtaaaacgagagataacaccgatttgtagggtgcctttttttaattgataatcaagtacatggccaccaccttcacgttggtgattaatataatgctcatgaaatccagcaacattaaggccttgagtaaattgtggggaacgaaagccggcaataatacccatttcatcgtgaaaggtaaaaataggctgattttcaatggcttctagcatgggcacataaggaggctcttgacgtggcactgtacgtgttttaactaattcaaattcgccttcaattttgatggcacaaaatagattatcggaagggacatattggttaataatattgtgaacctgttgttgagagacaggatctgaaaactgatgtgtaatatcaggtttaaagaaagtcattacagcaaaaggcgagccttgatctggacgggcttctcgcgcactgccatctgaacgtaattgaaaaacgttactatcaaaggcgaccaattcgccatcaagatgattaaaagtacctaaaccaaaatcaccatgctttaataaatcagcaatagtaacattactatcataaacaccagcaataagactactcattaaagaattttggtagatagtacattctggatgtttattaatataatgatttaaagaagttattatttcttgggtgcagttgcaggaactatgagtatttttatggttatgggtgatatcactattatctcgctcgatatggttaaagctagttttcataatgaagcagatccttatttatttagatagacattcatcaactatcaatttcattattagccctataggtaagattttcaaatgttttaattgatatcaaaaaagatgtgataatcatagagagtgagattaaagctattttattgttttttataaatttaattttacgtgtaactttattaaaaaaaaattaaaaaaatatcaatgttattgatgaggttgctttgtttgtttctatgggaaactataaattaatgtaattattttgagcgattatgagtaatcacaaggaaattaaagaagaatttaaagaaaatggatattaatagttttttattttcattgtgatttattagaaatatatttttagttataaataataaaattaattttcttaaaatttaaaaaaagattaattttaataattattatttaggaggaagttagagttatcaagaaggataaaagtgttacaaaatgtaacttttaattccaggtaaacagaaatgtatctatatatgtaagattgctgttgttattatgtaagttgttaattttcatttgtcattatatatcaacagattatgttgatttttttacatttatgatcggtatctccgatcgatggtctaattatgataggttttatctatcgcatttcacttaattgatcgattaaaacgtttttactaagtctaattatgacaatatagtaataaaaattttagttaagtagagggtaaagtaagaaaaaggaatgctttcacaaatgaaaaaagatgataataatagcgttagtatgtcggatttttttaataaaaaaacagggttgtttataaagtataaaaggaaagagttaggtttaacaggacaggatttagcgatcatattgaatgttagtcagcaacaaatttctcgatatgaaaatggaactacaaatattactgttaccttacttaataaaatactgatgatattggactcatcatggagtgagtttttaacatttaatgaattaactgataggtattaattctgatttaattgttgttaattaatatttaatatatggggaagtttaaatgaaaaaattattattacctttagtcatgagcagtgcattatttagtggatatacattagctaataccggtgaagttcaatttattggtgcggttacgtcggaaacgtgtgatattgatacagaaattggtggtttagttaaatcaacaatcgatttgggtaaaatgaccactgcagataccaatggtaaatatgttgaatttgaattagtccctcgtacggatgaatgcctgaaaaaaaccagtggccaagttggttggcaaagtgcaggttttactaattcaggtcttgctaatatgaaaggtactgccggtggtgtatctattcaattaacagcgattaattcaaccacacctaatcaggatgtaacttataataaccaaagtgttgattttggtaatggtaatgatccaattggtaatatgaaatttaaagcaagaatgacagcaacggcaggtcaaactgttacagagggtactgtaatttcaagcgcaacttatgcagtagcttataaataatgtttcattatttaattttataatgtctattatcaatgtagttacttttatttaattattctaataatagttattattatgctctatttagggtgcttttaatctattctatttttgtgaatataaataaagtttaatataagcattatgactggaataaagggtcattgatcctttatttcatttgaaaatattaatggataatatcaatgcgtttaaaatcaattaatgcttttgtgttatccttgttagtaagtccattttatgtttgcgcagatttaaatatggacttcttacatggaggagttcaactgcaagctgctggtgtatttgatgaaaataccaattatcctgctgggcattatattgttgaggttatttttaatcgaaaattaattagtaaaaaagaattaattatctcaccagaagataatgaaaatttatgtttaaaaaaagattggattaatgagttatcgcttccaataaaattaaatttatttgaattatattatcatcctgagcgcgattgttatgatattagccgttatcctggggctcaggttatttttgataattcgaagcaaactttaacatttagtattcctcaaattgcattagatgaatctctgcgccggcaggaatgggattatgggataacaggtattaaattaaactattcgggctatatttctaaaaccagttcttcacaagcacaaatttatggtgattttgatttatatgctaatttaggtcgttgggtcgcttatgttcgtagtagttaccaaaggaactcgggtacagaaacatcggaggcaacagtttccacagcaattaaatcaatacaaggaagttttaccgtaggtaaaacaataacctctttatcaatattacctaactttgctttttatggaatgtcactgcgctcggaaagggatatgcgcccatgggaaaaacgaggttatgcaccggttatttctggtgttgcaaactctaatgctaaaattactatatctcaaaatggatatgtattaagttcacaagttgttcccgcaggggcttatcaattaaaaaatatagcaccagtaagtaatggaaatataacagtgacagtagaagaaagtgatgggacaaaaacagttcgctattatcctgttgccacactttcttccttattacgcacagatgaaataaattacaacattgctatcggagaaaaagaaacagtaggtaaaagagaaaatagtttattttttctaggtgcatttgactacggattaactaatgttacggttcatgctgcgggaattttgcataataattataaaagtgcagcattaggaatgagtaaagattttggacgatttggtgcaatgtcatttactgctaatactgctgtaagtgtatttcaaaaacagacaccaacagcacccgaagttaggcagtctggtatcagctattcgttacaatatgcaaattcattgactgataatactaatttacagctactcgcatatcgctatactggtaaagattatgttgattttaatgaatttaattcaaatgctttatatcatcgcagtaatcgtaaagagcgttatgaaacgatattgtcccaaagttttgatggtagctttgttagcttatctgcttggatgcaaacatatagaaatagtattagtaatgaagttggcgcaaatattacttacaatacaacaattaaatctgtcgatttctcattatcagcggattatcaaaaattaaacgattatgagcatgataattatattatttctgttggaataaatattccctttagcttatatgataaaaatcatttttgggcaaattctgttagctacgataggaaaaataaagctagttttaattctggtgtttctggaagtattaatgaaaaaataaactatagtatcaatacaagtaaagatcgtgataactggtctaattctgcttattttggtattgatcatagtattattaatacgggatatgcgatttctcaaaatggccatcaaactaccagttctattaatgcttcaggaagtttattagccaccccagatacaggattattattcagtaatgtcagaagagatactgtcgcaattgcaaaaattaaaaatatagagggtataacattcaatgactcaccgccaactgacaaagaaggaaacactattgttggggtatcaccatacattgaaaataatttaaaaataaatacagaagaaattccgaataatgttgaattacttgattctgttcaaaattttactccagcagataaagctattatttatcgcgagtttaaatattcaacaattcaaaggtatatattaagaataaaaaataaaaatggtgattttatttctgctggaagtgctgttagaaataaaaatgatgaatatatagggtttgtttcaaattctggggttcttttattaaatttattagataagcctaataagctattcgttatatcacctaatggtgaaaaatgtactttaaatttggagaaagtagaatctaatgatcataaaattatggaaattgaatgtaatgaatagaatagtatttgtttttgctttaatcatatcgtcattaacctgttttaaagcatattcagcgtttacgcttaatggtactcgctttatttatgatgaaggtcgcaagaatatcgcgatagaagttaagaataatagtgataaaacctatggtggccaagtttggattgataatcttaatgggaatgaagtgttctttattcctgcacctaatttattcaaaataactggaggagaaaaacaattaatccgcttgctatatgtaaatgatattttacctaaagatagggaatcattgttttggctcaatattcaggaaatcccgccaatttcttctgccgatgacagtaatgtgcttgctgttgcattaaacacacaagttaaactgatttatcgccctaagattttagctgaaaaacgcgaggatgcagaaaaaagtctgacatatagtggttcagttttaaagaatcctacaccttactattttgcattaactcaagtgtcagtcaataataatcctttggtcttgtcaaaagacattgagcaatctattagtttatttccacctttcagtgaggtaaatgtgcagcgcccattgttaggtaaagtaaccgttgaagctattgatgattatggtgctagacgtgttattgagcttaattaaggaagtaaaaatgaaaaataaatcattttatttcacgctattattattttttattgctatggatacttctgctgctcgatgtcggaatgtgtcaatcaaatataattttccagcccaaatagatattacaaataaaaaagtgggagataagctttattcttttggtgcgccagacgcccctataaacgttgctggtcaatgtctacgtgctaatagtggggcgggaaatacaaatggaaattatatttatattgttgatcaatatggatcatcaccaacattatgcccgactactggtacagttgataaaaattcaccagatggatacttgcgttttcgttcaacgggaagttgtgctaattcttcttggctactagttcttgattataaaatatctggggttggctggaccaatttaacaggtcccggtggtggtactgattcaggcgttgtttatttacaaaaaaagccacctgtaggaaaaacggttattaatcctgtctatatgttgaaacgtaattattattctcgaattggtcaaatgggcaatacgttacaaaaggaaagcgttgctcttagtgcaccaacatcgatgacgttgataaataatgcttcttgtgcagtgtctgttaatgacgtcgcatttggtgaacaaaccgctagtgacgtaaaaatgaatactattgcaggaaaaaatataaatatttcttttacgtgtaatgctgtattacctgcatacacactcagtttttctggtaaagatggtgtgaataatgccacaacagggatcattaaggttaaagataatagttctgtggggtatcaactttcttgggcagatagcacggttaaacccattaatagtgctgtagttattaataatgtggcaatagctccgaatacaaagccaaaaaccaataattttactattccgataagggtaaaacctgttgcgttatccactcagccaatccctgggccggctaatactgcattaacgattaatataaagttaaattaaatggagttaacgatggtaaaaaaatcttgttttatgtttagcgttattttatttcctatttatgttggagcaacaagtttcacctctaatgttactggtggaacagtcacttcaaatttaagtatgacagtgaaagcctcttgcagtacaacggttggtgatgtgacatttggtgaccaaagcgcgggtgatattaaaaaaggagctgtcgcagagaaggtaatatcattggctattgtatgcgatacaaaaatgactaattacacattagcatttacggcggctgatggtgttaaagatgtagcaaatggcattattaatactaaattaaattcaacggtgggttatcaacttaagtggggagattcgaccgttaaacctgtggatacagcaattactattaatggcagtacaattaccccaacaaacaagccaacgcaagaaagttttactattccaatcaaagttaaacctgttgctcttggggagactgtttctcctggtgcagcaaatacggcgttaaacattaaactaactttcaattagttgagggactatgtgcaaatctatattgcttaccagcctgttaatctttatcacaagaagttgttatggctctgagttaaatgcaacctcaatcattggcggtgctgttcaatcgcaatttagtatgaatgtaaaaatagctacatgcttacccgctactgttgacaatgttacttttggagcagttgatacagcgactattttatcgggtgaagttgaagggcactcaacactctttttggattgtacgggcacaattaagccacaaagagttacaatactttttgaacctgctaatcctcatttaaccatgggtagtgtgggttatattggttcaaaaaataccacacttggctattttgtgtcgtgggaagatgaacaaataggtgctattggtgaaggggtaccaatggggaaggaacttttttttaaaaaaacggatgcttcattgatgaaagttaaacttaaaataaaaccagttgtacttccattaggaggaaagtccgttcatttgggtaatggaaatacccatataactatcaaaataaaatatatctgatatgagtttttgtatgaataaaaaaatatatatgtattttattattacttgtttaagtaattttcctcaaccaagtttatcagatgaaatcttacctgatgctcaattaacaatttctttggatgtagttagaatcacttgtgatattaataatggaaaaggatttaataaaatagtagattttgatgttatcaacgaaagtaatttattagctggtaatcaaccagccgtaaaaacacagtttattgttgattgccaaaaaagtggttttaaacctgagcatattgatatcaaagttaagcctggtagccaaggtgcattaaataatggtattggtggtgaacttaaaaccaatttatctggtgtaggaatttatttatcatgggcagactcaagcccaataaatctatctggagtgaataaaagttttagtgcagatcttaataatcaatttgatattagtttttttgcaaaaccatatgctcaatctcaaattgttgaaaaaggttcactaaaaagtagcataattattaatgcattatataagtaatttattttaatcttattcaaaaagggaacgccatattatgtttcctttatatattacagagcaattgctgtaatattatcattggggctaagatctataattttgtccccatgaatagaaaactgtctttagtgctaggggagtgttcaccatacattgagctataagtgtgaatcccttattcttataagcgtattctttcgtgattatttacaaaaagactatgtatatccgaacaaaattgagagttttcaatgaagtcaggtaaaactaaaacataatagaaaatatcatctaactgtatatttatatcatatggtccaaaatttgattcagatttaaattcaaataatttagctattccatgtaaattaactatcttagcttctatgcaaaaatatcctttattgtcaatatcgaggttatagcaaatatcttcatgatgaagtaacatgtttttatcatttataaaaaataaagattcttcgttgttgtatgaattatattcgtatagataatttattttaaggatctcatttaaaaaaagaaaaaatactttccgttggtttgttcgtataaaatccatataattcgcctgtccattcagacataaaattctcctatatgtaaagcctgacctccgactacaattagaaaaaactaattatcaaccgaagttcagacgcttacacttaaaattattcactatatgacgtaattcatcatatctaaactcttcatagaagatttagagctttcaattattagcccactataaactagttatttcttctatagaataaaaagtaccatgcaaatgctgattataatgctctactctatcagctaatattattcgattattattggtaatcctttttctaactaattttgcagcattatacagttctattcttagtttaattaaattagatctatcaggtgaatcttcagaaagataacttccaatagttcttaataaacaacatattgtatcagactcttgtcgtgtcaaatattgtttatgtcgtaactttaggtatgcatagcaatataccttactaaaggtgttcttctgatgtagtgttttatttatagccaatgccatgattagtttatcagctaaatagcgatgttttaagtaagatctagcattcttccattcatttaaccctctatctatggataactcagtttgccgtaaatatgaatacaaggctaataaaagtttattatcatagtaaatattcattatcgacaacctttttctgttaaacgagaccaccaagattgtttttttaaacacagtattcttattatgtagagataatggctgttcagttggtatgacccctgtttttcttggcccaacgttagtttcaattatcatttccttcggaacctcaaactcaacatatgaaccacttttccaagatcctatgtctgcacctgccgttttgggatctccaaacggagcaatctcgatatgcactcctattggtgttcctcttgcagggttgattgactgtgtgttttttatcccttctaggccttcaactgaggtatggtgccttactctaaccatttcctgagatgacaacccccacggatcaatccatcccaacggattcggcgcatattgatacagattaatcccacccaataatccaattgggtcaggcataataaaacggcctatctgtgggtcgtagaatctaaaggtattaaaatgtaatcctgaatactcgtatcatcctgatactcgccctacgggccagcgcaagcgctgttcaaatttgttcccgacaaatttgtcattgtcaaaatactgtccggcatagcataagttttgctcaaaggaggccatcacacgttcagggtcagagtagaaacttaatgggctattgcgaacaaagccaaagcgtttatattttcctgaccatagcgtattgccttgtgcattggtgacttcaagtggggcgctgttaatatcgcagtggtgccagtaataatgaaaaccactggattgtttcacgataacggcaagaggggtataactgccgtgctcttcatagcaataagtttgatatttatcggtgttgatatccttctcttgcagtaaccgtagtcctagctagtttcggcatcaggtgcacattaatgttgttttgcggatttatgcaggatagtttattcttatttttaaagaacgtgtcacgtaacctaatttttttttacctattattttcttaataaaaatactactttgaattataaagcagactattcattaacattgaaaaattcaatattcaatccctcatcattacataaatcgacaaattgttgagagagaatcatttgctcacaaaaaacgctatctctcgctataaagaaatctttatcacatttataggtgggaatatcgatcaatttagtaccatcaataagttccctgaatgttgttttctcctcgtcaataatcggaaggtaattattcaccttacataaaaacatcgtttcatgcgtattttccacagtacacttatagaatgacatttcagatgcaattctaagttcaaatatagataccgctttttgcgaaaaaacaggaactccgatattagaaggaaaataatctggtgctcttagtttatctcttcgcatagtactttgtattttaccttttggttgtgaatataagagaaacttaccattcccttcattccaaatgaaaaaacttgataatcttgactttggatctgagaagtcaataactccattgcctaatgagaaactactaattgtatagatgttcatacccttatcctcgtaatcaagcacatgtaagttttcctgttttaaatcctttacgagcctcatgttgtaggttcaatatttcattttgtattcggcgataatcccatttttctttaattgcaactctttctaaagcatctagttttgatttcatcatttcatcatttcatcatttcatcatttcattatatattgcatgctcttttgtccaaccacgatgaagtcccaaatcctgattaggatctattccttttgctacaggaagtcgcatcatgtttgttgcaccattaatattcattcctgattgcacaaaaataggatgatttctgagtgaataaggaattaaatgctgacgttggtaaccttgggttgtatccatccacgaagggaagcgatctagacctagcggatccacccataccaacggattaggcgcatattgatacagattaatcccacccaataatccaattgggtcaggcataataaaacggcctatctgtgggtcgtagaatctaaaggtattaaaatgtaatcctgaatactcgtatcatcctgatactcgccctacgggccagcgcaagcgctgttcaaatttgttcccgacaaatttgtcattgtcaaaatattgtccggcatagcgtaaattttgctcaaaggaggccatcacacgttcagggtcagagtagaaacttaatgggctattgcgaacaaaaccaaagcgttcatattttcctgaccatagcgtattgccttatgcattggtgacttcaagtggggcactgttaatatcgcagtgatgccagtaataatgaaaaacactggattgcttcacgataacggcgagtggggtataactgctgtgttcttcgtagcaataggtctgacatttacccgtattgatatcctgctcttgcagcaaccgtagtccttgccacacaaaatgggtttcatgtcgtttcagtgtgccgtgagcccgtgactcaaccactttatgaatccggcgacccagtgcattgttatttcaaagtgctgatatctgtaaggcaaatattgaaaagcagggttgcccctgctggtagttatgaaaaatatgcaggtagagcatctgagttaagtttagatagctcctaataattctttaatatgataatcagaataagggattaattcggggagttttttggcttcttcttcagatattgaataagtattatcgaaaatgtccttttttttgcatgaattaccaatcccgaaagtaaaatataccccttctacattaataggggtgtagttattctgatgcccaatgatcctccagtcactattgggatatccttttctatcaaataacccgtaagtatcgattacaacgggttcgatttttctgttagatttttttatgtcgtcttcggttatggatggactagaagaaacgaaatcgaaaatctctactacatggcctgtcatgatttttgaaatgatgcgtccaaacccatatgtttcattatttaattgaaaacaaaagatatctccgggttttacatatctcagcatcgttcgtggttttttattccatccccaaaatttaaaatcactcattagcatttccctccgacttttccagaacttttagtcttactgtcataagcttctttaaaagcatcagcacgtgtatcagtccggttatggtcaaatgaattgtatttgttacctcggttagttgacgatatatcttctccgatagttcctgttctcgtaccatatttttcaatataatactgctcatagccgcgagcttgaccatagttaatattttcattaagtactttcattcctgctcccggcgttaaccgacctgtaccaacatgttcgatcgttcgtctattaatatcattagtaataccaacataataaggctcttttgcgcctgaatcgaacaagccataaacataatatccgggagcatcaacagcagttaacccccaaggatcaatccagcctaacggatttggtgcataagcatacaaattcaacccacccaataacccaattgggtcaggcatgataaaacggcctatctgtgggtcgtagaatcggaaggtattaaaatgtaatcctgaatactcgtatcatcctgatactcgccctacgggccagcgcaagcgctgttcaaatttgttcccgacaaatttgtcattgtcaaaatattgtccggcatagcgtaagttttgctcaaaggaggccatcacgcgttcagggtcagagtagaaacttaatgggctattgcgaacaaaaccaaagcgttcatatttccctgaccatagcgtattgccttgtgcattggtgacttcaagtggggcgctgttaatatcgcagtggtgccagtaataatgaaaaccactggattgtttcacgataacggcaagaggggtataactgccgtgctcttcgtagcaataagtttggtgtttaccggtattgagatcctgctcttgcagtaaccgtagcccttgccaaataaaatgcgtctcttgtcgtttaacttggccactttctcggttttcaacggttttgtgaatacgacggcccagagcatcgtagtggtattgggcttttatgccttgattatgagcgataaccagacgattatcaccatcataagcataggtttgtggtgattggttacggtaacggcgagcaataacattaccataggcatcatactgatagtgccacccttgaaattgacgtagtttatctccttgaggactcagcgctaaagtaggggagtgttcagcatccatttcggattgtgggcgttcgagtagattatccgcgcgatcgtaaaacagcatagcatcaaggttttcactactggcgactttttttaaacgttgctctgagtcatacaggtattctacccaacctcgataggtgtcttccatggcaccaagattatcttggggatcataaaaccacttacgccataaagtaataccatttaatggatgttgcttatcacgcgagctgaaagtgctaatggttcgccccagtttatcgtattgccgatattgggtgagttctccttgagttcgactgatttcacggtgtaggtcgtcacgttcaaattcagtaagtaactgagagcgactatcaacaaggtggttgatagccgtggcatgcccagagccataatagagccagttgaggctgtcaccttgaggtaacgtcagacggcttaggttattgagttcatcataattaaattcgacgatatcgtcgcctgtttgttcacgaataatgcggccaagtgcatcgtaggtaaagtggacttgattcgcttgcaaacccatttcaagaccacgttgattaggttgtttgctggcgaccaataggcggttcatactatcccattgatattgatagcgatcagttaaagtctctcgtttggcaaggttccccgccgcatcatagtcgagtaatattgtgcgtggtgcggatgtgaagactcggtcgcctaagtgagcttcttcaaccagtcgcccagcgacgttataggtgtattggagtagcgtctcatcaggacgtatttcttcgactaaccgaccttcggcatcacggttgaggagataacgcccgccattggcattttcaattgaaattaatgcaccttgtgcattgtaatggtagtggatatgccgagcgagtttatcaatttctgtggtgacgcgaccgaaggcgttgtattgccattgacatggggtattgtcattgcgttgatgatgagtaagtaatcctgcggcattccatgccagttgcacggtagaattatcgggcaatatgatgcgagtgaggtgtcccacctcatcgtactggtactcggtggcttcctgcaaggcgttggtttgagaaacaacacggccttcgtcatcataacaccaaatatgttgtttgcctgagcaatcagtatggcgcagtaattgcccacgtttgttccagagaaactcactgcgtccttgcttggcatcaatgcgtatagtggggcgcaatgtggttttaaagtcatagcggtattcggtgatctgatgaaggggagaaatttccttaatcagtcgccccaaactgtcatacgctaaacgcgactctgtgttatccggccaaaatacagtgataaggcgctcgcgttcattctgatattgccaacgcgtttggttaccattaccatccgttatgctgagtagtcggcccaatgcgtcccattcactaatatgtgtatgacccaacgcattgcgacaaccgcaaggtaatccaaactcatcccaaattagcgccgttttaatgcctgtacggtcggtataatgaataatttggtgatcatgattaagttgccaaaatgaggttgaaccatcgtgccaataagcggttcgtgtgaggttgatatcatcatattcaagacgatagctttcgccttcgctggttttgttttcaatcacttgccaaagattatcttctgaaagtgcccagcggtattcactgcgtaagccatatttatcgctatgccacgccataacaccggcatcagtccacccaaattggcgataagggtgatctgtctgttgctcaacacgtattaattgggcactttcgttgtaaaaataagcgcatagacgacggcgtatctgatgggggtttacttgatagactgcagtaagacgcgatacggtcttttcagcaagttgaaaagattgatattcacactcgatattgagatcaccacatcccgtaatatggatcagttggtggtgctcgttgtaatgaaaccgctgctcgtttcccacattatcaacgatatgacttaaacgactataacctttgtcatcaaaagggggataatgatagcgtagctcaccagcatcttgaaacgtccaactgtcatcctcatggtggatgatccagccttgagcagcttcgttaaagttacggtgtccgagtggaatgtcaggaaatggaaggatatcaccggatagattttgccaaacaaagccatcttcgcttttaattagctggctttcccaaaagaaactccaacctcgaccgagtgcaccctcatagcaatagctacttaagtaattgcgttgccaataaagtggtaattccgcctcatagctaaaatccaattcatcctcgtcattgaggattttttgtccgccaatcacttcaacagggcgggttaagatgccaatggccggaatagcgagactaagcccagtaaaaatttttccataacgacaagcaaagcgacttattttggcactacccggtaatttgttccacaacttcgctactgccccggggcctttggctgccgctgaaccaaaactcaggaaaccggcaaataacatcgtgagatcggatgcggtggtaacccaagagggaatttcaggttcaatatcttcggttgcttgtgttccaccgccaatccggacattgggggaaccttccatgatagtcgcatcacaggtggttttatcaccgacccgagaggctggaaaaccgttgatatagacactacccgagccttgagcgatttggcgttcactgttttctttatcacatttgacgttgctacgggtagacattgcggcaggcttgccgttaatacgaacatttttggagccgtcaaggatttccccacaggggcttaaggattttgaacctgtttcaacacatttatcccgaacccagtcggctaatagggtagttccgtaaccgacggcaatggaagcaccaatggcaagcacgccaataccaatgcagcttgcagcaatacccgcacccattaatacaccagaaatcatggcgccaccgatggcgatagcagctcctaatagggtaccgacaagcatcccccacatcgattttgagtgaccgataatatctccaacccttgccgcctctaacatagtgattatccccttggttgaaaactcgatagcaaggtattcatccatgtccattgtgtatcattaaaagcgtgtggcgaggacatggtaaatataagaacttgagtattagtaaggggataaacggcctgtatttgataaacttgttgttttttgttggggcgatagcgagagctgattaaatatccttggatcagatcttgccccagcatggagggtttttcttctaagagttgccactcttttaatgaacgttgtaacagtgctttttgattaagaatatactcttcaaaggataggtcttttgctttatcatctcgtgagatattgaccgcatgaccagtaggtgaaatcagaatattgatagtttgttctttgtagccatcaggtaatagcacactgccttcagaaaaaatacaacgcgattcattattcatttaaattccttttaataaccttctcattgtaaataatgccattattgagaataatacgaagtagtatgtaataagttaagatcttagttaaatcaatataacgttaaattaaaataaggaaaattcattttttcttctatcatagaaaataatttaaaaagaagggttgtgtcacaaatgagaagattaaaattatattaattaaggattgcaatgaaactatttaatgggaaattataatgattaaaatgtaataaattgtttttattgaaatatacgcattttattattttttgattatcaatatataatctattttatttttaagtaaaaactcattaaatgagtgggatgcaaatttaatgcataaattagatattaaattatattaaagttattttttataaaataaaacagcataaactttcgataagtctcgtagagtttatgctgcttttgttagtatttaaacgtgaagaaaaccgaataatactaaataataataaagctatttattacacattaaacaagaagttcatcacatcgccatcttgcacgatataatctttaccttccgcacgcattttacctgcttctttcgcaccttgttcaccaccataagtgataaagtcattatatgagatggtttgggcgcggataaaacctttttcaaagtcagtatggatcttacctgcagcttgtggggcagttgcacctacagggattgtccaagcacggacttcttttacaccagcggtaaagtaagtttgtaaatcgagtaacgcataacctgcacggataacacggtttaagcccggctcttcgatgcctaaatcttgcataaactcttcgcgctcttcatcgtctagctctgcaatatctgcttcgatagcagcacaaacaggaacaacaacagagccttcggcttcagcgattttacgtaccgtatcaagataaggattattttcgaaaccatcttcattgacgttagcaatatacatggttggtttcagggttaaaaagcttaaataacggataatcgctttttcttcatcacttaaatctaatgcacgcaacataccggctttttctaagtgcggtaaacatttctctaaaacttccatctctgctttagcaactttatcaccacctttggcttttttctgattacgatgcattgctcgttcacaggtatctaagtcagaaagcgctaattcggtattaattgtttcaatatcttcagcaggatcgactttacccgccacatgcacaatattgtcattttcaaaacaacgcacgacatggccgatagcttcagtttcgcggatattggtaaggaattggttacctaagccttcacctttagatgcacctttaaccaaacctgcaatatcaacaaactccattgtagtgggtaacactcgttgtggttttacaatttctgctaacttatctaagcgaggatcaggcatgggtacaacacctgtatttggctcaatagtacagaatgggaagttggctgcctcaatacctgccttagttaaggcattaaacagtgtagatttccctacgttaggcagaccgacgataccacatttaaatcccataaacgttcaccttgtcacataaaaaacaacaggaaagggggagctcctgttgtgtgctgttaaaaaaattggcgctattatagaacaaatccctgtttgattaaatcatcagggattaattgcgcaaaagaaaagggcatggcattgcccagttaacttatttgatacactaatagctttattgataggggttaagctttaaagctatgtaaacgattaatggctttttcgtaaccatcacgcatcagaatatctgtacaagcaagggcttcatcaattgcatcatcaataagtttttgctcacttgttggtggtttacctaacacaaaaccgaccactttgtttttatcaccgggatgaccaatcccaatacgtaatcgataaaaattggggttattgctaaatttactctgaatatcttttagtccgttatggccaccattaccgccacccaatttcatttttaccacacccggtggtaaatccagttcatcatgtgcaaccaatatttcatcgggttgaatacgataaaaatttgccatcgctaataccgctttaccacttaaattcataaaagtggtagggactaataaacgaacatcattaccatttaaattaatacgagcagtatagccgaagaatttgctctcttcttttagagattgttgatgacgttgagccaataaatcaacataccaagcacccgcattatggcgagtctgggcataatcagcaccggggttggctaacccgacgataagtttaattttactcacaattgcctttcactgttatcgtcttaaaagaaagcatctagtttacctttctctgtcaagaagcacaaaatagattgtcatgattattttgttgaaatctttctaggagagaatacttattatttatagggcaaaaagagcgaaacaggcgtattagcaccgataaatgatttataaaagcaataaaacacattttttgcaaagaattgtcaataattttcagagcatgtgatcactgcgacaatacctttttagtctttatggctataataactgcaatgaataaaaggttatttgatgtattttggtgttgaatcgtctgacgacgcgcttggaggtgcaacatgaaatataaacatgcttttgccgttggcaatttattgatggctatcggtatggtgcttatgctcggtagtcttggttataatcttcttagccatatttttccattaggactacctgatattttatctgatgcttcgctaatggggatctttattggtgcacttgtttggttagcaggggctcgtattggtggtagagaaaccgttgcagaaagatattggtggttgcgtaatcatgacgaacgttatcgtcgccatgataatcatcgttatccataacagtgtgggcatcaataaaatatagataaaatcataattcataatagagtaagaatagataataagtaactcattgtcgttaatatgcagataatacatatctaaagacccgctgataaagtgatagcgggttttttattgtttaaatattttatcttaaaaagataacaaaaaacccgctataacataggctatagcgggtttaattatctcaaagtacgatattaaatcgacaaattaatgttcgaacatcgcagaaattgactcttcattactgatacgacgaatggcttcagccaacataccagacaaggtcaatgagcggactttatttaatgctttgatttctgctgacaatggaattgtatcgcagacaaccacttcatcaataacagagcttctgatgttctcaacagcattaccagagaaaatagggtgagtcgcgtaagcaaatacacgtttagcaccacgttctttcagcgcttctgctgctttacataatgtaccacctgtatcgatcatatcgtcaacaaggatacagtcgcgattagcaacgtcaccgataatatgcataacttgagaaacgttagcacgagggcgacgtttatcaataattgccatatcagtatcattcagaagtttagcgatagcacgagcgcgaacaacaccgccaatatctggagaaacaacaatagggttgtccaattctttttgaagcatatcttctaaaaggatcgggctgccgaagacattgtcaaccggtacatcaaagaacccttggatttgttctgcatgtaagtcgcaggttaaaacacggtctacgcctacactagataagaaatccgcaacaactttagccgtgataggaacacgggctgaacgaacacggcgatcctgacgggcatagccgaagtaaggaataacagcagtgatacgaccagcggaagctcgacgtaatgcatcaaccatgaccactaattccattaagttatcattagttggtgcgcaggttgattgaatgataaaaacatcaccaccacgtacgttttcgttgatttgcacactgacttcaccgtcgctaaaacgacctacagcagcgtctcctaagctagtatagagtcgattggcaacacgttgagccagttccggggttgcgttaccagcaaaaagcttcatatcgggcacgagaaaaacctcaggcttgcgtccagagagagatattgttgacctgtaaagaacgtgtttatcaacatagggtttgtaaacatcatagttacgggtgcaataacacaggtatccttgagcggaataaatgcacaggggaaatgttaacgccttgcgccacaaatccgtgcacccactcaggggcgttaattaacacttcactagcggcctcttgcgattcaaactcaccgaatacacaagcacctgtcccagttaagcgtgacggtgcatattctaacagccacgaaagcagatattcaacctcacgaaaacgttttcttgcgatcatttcacagtcatttgcaaacggagcctgtaataatgcgcccagagagcgaataggcgaattacgttttaattctggatctgtgaagattgtcggggttgggatagaaattccggggtgagcaactaaataccaacactctttgggtgatgctggggttaatatttcaccaataccttcagcaaaagcggcatgccctttaacaaataccggcacatctgcgcctaacgtcacgccgagtgtggctaatgtttcatcgcttaggcctgcttgccaatggtaattaagggctatcagtgttgtcgcagcattggaagagcctccccctaaacctcctcccatgggcagttttttatcaatactaatatctgccccttgatagcgtaggggaatatggtgctgatagcagtattgacgtaataatttggctgctttaataatcagattatcttcatctgcaaccccttcaacgggggttaagatggttaactgcgtatcattacggggcgtaaaagttagcgtatcgccataatctaaaaattgaaataaggtttgtagattatggtaaccatcggggcgtttcccggtaatgtagagaaaaagatttaatttggcaggagagggccaacttagtgtcattgctgtatatcccagttatccatttttaattttatcgtgcgttcaccttgttttaattcaaggcgctgtggcaagttcggtgttattgcggtgtcataggattggtaggttaccacccaatcaccttctggggttggccatgtaaccgattttaaaagatgatttgcatcgagttcaaaatccgtggcatcacccggtaaaccaattaaccaagcgcgtaaattttttaaagggatcaccataccggtgagctgataaatcatttcagttggattgtcactataatactttttaccaccattatcagtcacttcaatcacaccaggcatcacatttaagtctagctctgtcgtccccaatggattggttaaaagtaagcgatagcgatcggtatctttatcttgccaatagaaacgtgcgtaagttttataggtgccttcaatgtaagcgaaggcgccacgtgtctcatattgtgaaatcttatttaatgcttgttgacgcgattgccattgaacatcgttatctgacgctgaaccttgtgtttgtatattatttaaattacatgcacttagtagcagcgcagctagcggaaggagacgcaaaagtgatttggttggaaaaatgcgtgagcgcatagctgagatattccttacattcgttctttgttgcaaaaaagcgtatcataaacgcgaagatataacgatatttcgttaaatagtcgattgaatttgcctatcatacaagtaagcacttttattgaaagagttcatcaagtagaatggcggcaatgaagagtccatactaaatgcgctgttttaggtttatactaagtcaagtcgcgagtcggtatttattcataactcaattataagatatgacgttattagcattaggtattaatcacaaaacagcccccgtagcgttacgtgagaaagtctctttttctcctgataccatgggtgacgccttaaataacttgttacagcaacctgctgtaagaggtggtgtagtgctgtctacttgtaaccgtactgagctttatctgagtctagaagataaagaaaatagccatgaacaactgatcagttggttatgtcagtatcaccaaattgagcctcatgagcttaaaaatagtgtttattggcatcaagataatcaagcagtgagccacctgatgcgcgttgctagtggtttagattccttggtattaggtgaaccgcaaattttagggcaagtcaaaaaagcgtttgccgattctcaaaactatcactcgctctcttcagagctggaacgcctgtttcagaaatccttttcagttgcgaaaagagtgagaacagagacccaaattggtgctaatgctgtttctgtcgcttttgctgcctgtactttagcgcgccaaatctttgagtcattatcatcattgactatcttattggtcggtgcgggtgaaacgattgaattagtggcgcgtcacttacgtgaacatcaagtcaaaaaaatcattattgctaatcgcaccaaagagcgagcgcaacgtttagcgaatgaagttgacgctgaggttatcactttatctgatattgatgagtcactttctcaagcggatattgtgatcagttcaacagcaagtccgttgcctattattggcaaaggcatggtagaaagggcgttaaagaaacgtcgtaatcaaccaatgctactcgttgatattgctgtgcctcgtgatattgaacaagatattgaaaaactgagtaacgtttatctttatagtgttgatgatttagaagctatcattcagcataaccgtgaacagcgccaagccgcagccattgaagctgaacatatcgtgcaacaagagagtggccaatttatggattggttacgtgctcaaggtgctgtcggggcgattagagaatatcgcgatagtgcagaaatgttacgtgcagaaatggcagaaaaagcgattgcattgatacaaaatggcgctgatgcagaaaaagtgatccaacagctttctcatcagttgatgaatcgccttattcatacaccaaccaaatctcttcaacaggctgccagtgatggtgatattgaacgcctgaatctcttacgtgaaagtttgggtattacccataattaactttatctaacaggatcttaatctacgaatgaagccttctattgtcgctaagttggaagctctacaagagcgttatgaagaaattcaagcacttctagcagaagctgatgttattgcctctcaggagcgttttcgtgcgctttcaaaagagtatgctcaattaacggatatcacatcttgttatcgtcaatggcgaaaagtgcaagatgatatggaagcggcagaaatgatgcttgatgatcctgaaatgaaagagatggctcaagaagagctaaaagaagcacaaagcgtcaatgaggagctagaacagcaacttcaagtgctgttattacctaaagatcctgacgatgagttcaactgtttccttgaaattcgtgccggaacgggtggtgatgaagccgcacttttcgccggtgacctattccgtatgtatagccgttatgccgaagcacgtcgttggcgtattgaagtgatgaatgcaaacgaaggcgaacatggcggttataaagagatcattgccaaagtgattggtgatggtgcttatggggtactgaaatttgaatcaggcgggcatcgtgtacaacgcgtgccggaaacagaatctcaaggacgcattcatacttctgcttgtacagttgcggtattgcctgaagtgccagaagctgaattacctgaaattagcccaagtgatttacgtattgatacttttcgctcatcaggggcgggtggtcagcacgtaaataccacggattcggccatccgtattacgcatatcccgacgggcattgtggtagagtgtcaggatgagcgttctcaacataaaaacaaagcgaaagcgatgtcagtattaggtgcgcgtattcgtgctgccgaagtacaaaaacgtcaagaagccgaagcatctgaacgccgtaacttattaggttcaggtgatcgttctgatcgtattagaacttataatttcccacaaggtcgcgtgacggatcatcgcatcaaccttactctttaccggttagatgaggtgatggaaggtaaactagatgcacttattcaacctattgtcactgaatatcaagccgatcagctatccgctttatctgagcaagattaatgaattataaacaatggctgcatcaagcagccttgcaattaattgatagtgacagcccaaagcgggacgcagaaattctattagggcacgtaacaaagcgtgctcgtacttatttgattgcttttagtgaaactgtacttttagaagatgaacaagtgcaattgtcatccctccttgctcgacgtataaagggcgagcctatcgcttatttagtaggagagagagaattttggtcactacctttaaaagtctctcctgcaacacttatccctcggcccgataccgaatgtctagttgaaaaagcattagagaaactctctgcacaagcaagtcgaattttagatttaggtacggggacaggggctattgccttagcgatagcttcggaacgttctgactgccgtgtccttggtgttgattttcaaccagaagcggtagcattagcgatagaaaatgcacaacatttggcacttagcaacgtagaatttacggaaagttgctggtttagttcactctctggttatcaatttgatatgataatcagcaatcctccttatattgatgaagaagatgagcatctttatcaaggagacgttcgctttgagccattaaccgcattggtcgcggcagatcatggttttgctgatattgagcttattattacaaatgcccgtcagtttttagctaataacggttgggtattaatagagcatggttggcaacaaggtgaaagagtacgtaatatttttattgataagggttactgctgcgtggaaactttccgtgattacggcggtaatgagcgagtgacagtaggtcgttggaatgatgatagaaaccatagctgattacgaatttaacaaagcccctttggttaagggtatgatccttatctctcaggcaattcgcccagattttccagtcacttcagttggctatcaattggcacagctggtggagcaagcagaagcggaaattccccaccaagccagtatacaagagagaattgatgcactgctgaagctattttataaacaatggcatttcagtggtgcaagtggcaaatattgtctttctgatacgttatggttagataaagtattggccactcatattggttcacctgtgtcattaggttccattttaatttatatcgcacaggcaataaatttaccgttagcgccagttatttttcctacacagttaattatcagaatagatattccgaatgaaaaaccacttttcttaaatcccattaatggtgaatatctttctcgccatactttagacgtttggctaaaaggtaatgtaggcagtacatctgagctatcagcatccgatctagaagagtcagaacacagttctattattcgcaagttattagatacactcaaagtctctttaatggaagaaaagaagatggagcaggcacttaagaccagtgaaacggtattattgtttgatccagaagatccctatgaaatacgtgatcgtgggctgatttatgctcaattagagtgtaatcatgtggcattgtctgaccttaactactttgttgaacagtgtccggaagatcccatttcagagatgattaaaattcaaattcattcaatagaacagcatcctgttgttttacattaaaatttaatcccgtactgggtatataacggtacatggcaaaataagataggaatagatatgcaacataaagtggtgagtattggtgatatcaaggtagcaaataatttaccctttgtgctctttggtggcatgaatgtattggaatcgcgcgatttagccatgcgtatttgtgagcattacgtcacggttactcaaaaattagatattccttatgtatttaaggcctcttttgataaagcaaaccgctcatctatccactcttatcgtggaccgggtcttgatgaaggaatgaaaattttccaagagctaaaagagacttttggggtaaaaattatcactgatgttcatgaaccttcacaagctcagcctgtatctgaagtcgttgatgttattcagctaccggcattcttagcgcgtcaaaccgatttggttgaggcaatggctaaaacgggtgctgtaattaacgtgaaaaagccacagtttgttagccctggtcaaatgggaaatatcgtcgagaaatttaaagaaggcggtaacgaccaagtgattttatgtgaccgtggtagtaattttggttacgataatttagtggtcgatatgctaggttttcatgtcatgatgcaagcctcagaaggggctccagtgatttttgatgttacccactcactacaatgccgtgatccattcggtgcggcttctggtggtcgtcgtggacaagtcgctgagttagctcgtgcaggtatggcagtgggtctggcagggttatttcttgaagctcatcccgatcctgatcatgcccgctgtgatggcccatcagctttaccattagctaaattagaacctttcttagctcaaattaaagcgattgactctctggtaaaaagcttccctgagttagataccagtaaataaacttgttatgcaactacacactgtagtgaatatgttcggcgctgatctccagcgccgttatcatgaaaaaatccacaaaataacccttcatggtggttttagttgtcctaatcgagatggcacattaggacgaggagggtgtacattttgcaatgtctcttcttttgctgatgagcaaacgcaatatcactctattgaagagcaaatcgcctaccaagctaagcatattacccgtgctcgccgttatttagcttattttcaagcctatactagtacctatgcagaagtagaacatctacgaaaaatgtatgaaagtgcattattacaagccaatatggttggattatgtgttgggacacgccctgattgtgtgcccgtcagtgtgttagatctactgcaaggctattgcgaacaaggttatgaagtatggttagagttaggattacaaactgcacataataagacattaaagcatattaatcgtggtcatgattttcaatgttatcaagcaaccacaaaagaagcgcgtcgccgaggtttaaaggtgtgtacgcatcttattatcggtttacctcgtgaagatcatcagttaaatatgcaaaccttagagcaggtagtagaaaccggtgttgatggactaaaattacaccctttacacatagttgaggggagtacgatagccaaagcatggaaagcagggcgtattagtgcattaacacaacaacaatatgtttatactgctggtgaaataatccgtcatactcctgcagaagttatttatcatcgtgtttgtgccagtgccagaaaacctactttattagcccctgaatggtgtgaaaatcactggttgggtatgaatgcactctatcaatacttattagaaaaaggcgtacaaggtagtgggataaataagccttttgtggctaattgtaaataattatccactcaacataaaatcacttgtcacttttttaatcatactgtacgctttgaatctgtacaaaggaggttgctatggctcaagcactagtagaaaacagtgaacgagtgtcaattcgtatcactacagaagataaatcactgctggttcgtgctgctagtttggaaaatacaaacttaacagagtttgtacttcgtaatattgtacctgtggctcggcaagttattgaaaataatgagcgtttaaaattatcagaaaaagacacattacgtgttatggaacttttagataatccaccaaagcctaatgctaaactacttgcagcggcttttgctctaccggacaatgcatgacaataccaaattgattaaatccccctttttctttattaatttcctttaaaaccatttatactgcactttcaatggcaaataaaatataaataataacttaataattaagcccttaattaaatagtgtaaattaagggcttaaagatttttataattaataattaaaaaactactgaattaattccatatcatccagcgctttttgtagcgaaggataaaaattaagtgtgccatcaattggcgttactcgtgctcttgctaatgtctttaatggctggaagggaatatcacaaacaataatatgagtatcatgttgcacatccgccacaaagtgttggaaagcatgtaatccccctgcatctaatacaggtactgcatcccactgcataataagagttttatatcctttactacgttcacgtaattcattaaaaatacgctcggcggcagcaaagaatagcggaccattaacacgcacaactaataattgtttatcatcatcagtataagttgattctgttattttcgtcatattagcaatacgacgcataaataataaagaggctaatacgatgccgatagtgatcgcaataaccatatcaaacagcacggtaagcgataaacataatactaaaacgataatatcgtcttttggtgcatgacgaataagatcgataactttacgagcttcactcatattccatgcaacaattaataacaatgcagacattgctgctaatggtaaataagagagaaaaggcgctaaaaccagtaaagttactaaaactaataaagagtgcacaatcgcagatacaggggacgttgcaccggcacgtacgtttgccgctgagcgggcaatagccgcagttgcggtgatcccaccaaagaaaggcgctacaatattaccaataccttgaccgactaactcaccattagagtgatgttttttccccgtcataccatcaagcaccacagcacagaggagtgattcaatcgcacctaacattgccattgaaaaagcggcgggtaataacgcactgaccgtgctccaatttaatgcaatagactcaccactactgggtaaattccacggtagcacaaattgtggcaggatcggcggaataccttgtcctgttgaaccatcaggcaatagatagctaaattgtgaaccaatggtggcaacatcatggccaaataaattaactatccccataacagccgtaccggcaattaatgctggtaaatgaccagggaggcgtaaattcaatttaggccaataaattaatactaagagggtggttacgcctattaatgtatctccaagatggattgtcggtagagcggcacctagagcaattactttatcaatataggtttctgggacatgcgacatttctaaaccaaagaaatctttgatctgcatggtggcgatagtgatggcaatccccgaagtaaatcctaatgtgacagaaacgggaatatattcaatgagcttaccaaaacgagctaaccccataaccactaaaataatcccagacatcaaagtggcaattaatagcccacttaaaccaaattgctgtgaaacaggataaagtatcaccacaaaggcggcagtaggccctgaaacactgtagcgagagccacctgttacagcgataataataccggcaatagctgcggtataaagaccgtattgcgggggaacaccgctaccaatagccaatgccattgccagtggtattgcgataatgccgacggtgatccctgcaataatatcttttaataaacgggcaaaagagtaaggctcttttacacatgcatcaataaatgcactaaaggggcgaacccggttaactttatgcgttttcatttaggcttaaaccaaaataagaagtcaaatgccgaataaaggcgataaaaaagagcagaaaggatatcgcttttatttgctaataataatgtgatatatcaaattattaaacactatcttaatacttagcgaaaattaaagcaattaattgaaaaacttaagcaaaagagataacgttatgtaacgtattgtatttattctgttactttcatgaaaaagaagtttgacgttattctataaattatataaagcgttttattttagaataattgtcattaaaaatagtagtgcataaaaatagctaaaaagtattttataaaataaaggaaaaaacaattctataaataaagctaattagtgtatataaaaaagagttttttattaaatagactaattaagtatctaaaatagattaatagcaacgtatataaaaacaatcacaataaatttattattacaattttagtaccggtagcaagcagaacgttgtcgctgtatagatgctgtatagattaaggacagcaagacaaaaaaacgcctagttttttaactaggcgctttcttagaagatggcggtgagagagggattcgaaccctcgatacgttgccgtatacacactttccaggcgtgctccttcagcctctcggacatctcaccgtattgtggttaaacatggcattcatgctcaatggggcgctactatagggaaaagagtgataagcgtcaacagctaaatgcgttttttccttaacttttgtgccaaccagtcaaataaaaaacaatatgaacaaggcttaagcaaataatgtgatctcttttgggatgtaacatccattttttagctaaatttcgttagctggttaacattatcaacatttttcttaacaactttttcaaacagacttgaaataaaagcataaccctcgcaccctatggtaaaaatgctggaggaaggcaaaaatgaatattattttttatcatcctttttttgatgcaaatacatggataagtggaatgaaagcacgacttcctgacgcgcatattcgtgtttgggagcatggtgatgataagcctgctgattatgcaatggtctggcttcctccctatgaaatgttagcaagccgtaaccaattaaaaggtatttttgcacttggtgcgggtgttgatgccattttaaagcaagagcaacaaaaaccaggcacattacccgctggggttccggtaatgcgcttagaagacacgggtatgggtttgcaaatgcaagagtatgccattgctaaagtgatgtattattttcgccgtatggatgattataaacgtcaacaatcacaacgcttatggaaacaactccccgcacatacttatgataattttgttattggtgttttgggtgcaggtgcattaggcgcaagtgtagcgactaagcttgctgaacttggttttaacgtgcgttgctggagtcgtagtaaaaagcaaattaatcaggtagagagtttttatggtaacgatcaactgagcgattttgttaaagagtgtcagttgttaatcaatctattaccttatacaccacaaactcatggtattttaaatttctcgctttttgaacagcttaaaccttcttcttatttaattaatttggcaaggggagcacatcttgttgatcaagatctgctagaagctatcgatcaaggttatattgctgatgcctctttagatgtatttagccaagagccattaccgggtatgcatccgttttggactcatcctcgtatctctattacaccgcatattgctgcttttactattccagatattgcaatggatacaattgttgaaaatattcaacgtattgaaaagggcgaaacaccttttggtgttgtggatatgaaaagtggctattaaataatatagatataatatatatataaatagacaataaattttattttattgtctattttttttgcctaaactttcaaaaaaagaactttttctaaattttagataatataataaaaaataggctataaaagatatctcttataatatgtcttatcgatgatacctcatctgcttgaaatgttgaggtgtttatgattgataaaataatgacatatgttaataaattaacagaggttggtgtttttaataattataaatcaacaaattatatttccgatgtgtctaatacccctgctgtatataatacaaatattaaacagtttagcttaaataatgtaaataattatgtttatcttggatcaacaaatagtccactacttaataatatgggaattacccttgatgatgatggaaccttaatgttaataaaagggaaaacatatgatttatttaccggattaattcaaaagtactttaatggaggttttaaatataaagtatttcatatcaattctcaacatggtgatgatataaaatttaaagaactatatgtcgattataatgggtttttaattgggagtaagagagatacttcaggaaataataatgaactttataaaattaaatttaaaaagattgaaggtgaatataatttaatcgatgatgccaccgataatactaatattaattttattattgaatatgaaaaatatgaaatagaaaatagtttaaaacatgatttatctaatattaataatattatagaaaaagaagaaggaaatgtattaaaaataaatagagaagggatgcctattactataactttaaaagataataaactttttacatatggcttaccaccaaagctaattgctaaacgggatgtcgtagatggtgagagtaaaaaaaatgaaataaaattgccattaaaatcaaaagataaaatattagcgataaaaccggtgttaaataaaatccaacttgtggttgataaaggtaataaaataaaaatatattactttgatcctctgcatatttttgcattaaaagattatcattatgaaatcactcgtttaactcaagagccaccgttatctttttattcaatggttggagaaaataactataaaaactatcactcaggacagccattttctactcaaaaaataggtaattttagtgctaaaaatattccctttttttcgtcggctattgataatgcaagggttcactttgatagagcaaaacaacaatatgcattaaaaaaatatggtgcaatggtaaaagatatcgcgaaaagtcttgatcctggttttagagggatgttttctactataaaagctatagttaattctgctacattaccgagaacaattaaaacagatgctttaaatggtgtaaaaaaggtgattaaacatgattataatctgcttaataaatatattaccggaattaacaatggtaaatctcaaggtgaggttgtttattctttagtagaacaattaaatgataaagagagcattacaattagccagtataatgatatccgtgcattctttggtattagtgcatttcatttatctcaaaatattggtgtgagtgcgtttcttttagctaattttgcgaaaacacatgccctaacaatttcaaaaaataagcaagatgaagttgtattctcatttgtaaataaaatggatgcagggattgctacgggcttatctgctgggattatgaacaatgaacaaaaatggagagaaggggcgtttaattatggttttgtaacaccgttaatggccactgtgatactcgattatcattatgaaaaaaaatctaatttttcatttaaaattcaaccaaaagatttagtcgaatttattaatcaaggggtatctcttacagaaagtgaacttaaggataatgcaacgctggaatttaatagaacacaaaacgcgtcattaggtgttgaacttagaagtgaagtcagttttgatgtgggagtttctgctaatgaaaatatagaattaaatttaccgagaaatgcggttggtgctaatctctctttaaaaataataaatgtcattcacaatataaataaatttattggtcatggagagaccaaagcaaaacagttggaaaaaaatgttgatgttgagtattttagcggaagttttgaattataccgagatttaaaatttacaccttcagcgacaaaagcatcgcataatattcactggtatccattgacatcattgaaaaattttgaagtcatgttagaaaaaagagttaattcactatttaaacatagaatttatgatggcaaaataaaacaagacaaaaaagaatttgaagcacataaaaataacttaaaaggactttataaaagagtgcttaaaataaataacctatttgataaataccctgttcaatacgatgttaaaagaagtataaataaacttgatcatgtttatttacagttggatgcaaataagaaattaaaaaacaaactaaatccacaattgatggagaatgatctttctctcaagagtgatgtaatagataactcaatagatctagtacacaataataacagagtacaacaattcttagctgatttaacagaaaagaaaaaaatactttcttcacagaaaaaaaataatatgaatgaaaaatttaagccatattttatttctaaatatcagctaaatagtgaggggagagtgcgttattcagtgcttgaaactcaactggaagagcttatcaatgaagtgaaaacagatgaaaatctaacagttaatgatataaaagataaattagataatttctataataatgcgaaacaagagttaaataatattgaataccagcttaattcaatagatgtgatgtctataagtgaactcgccgataaagcaaaatcatttcctcttgcttttttacgattagaaagcaaaaagtctattatgcatcatcaagttaaaggtgaaattaattttttatatgataaatatgaaaagcaattggagaaaataaccactaattattattttcattaaaccatttgtttttcttatctttatttggggtgatgtgtaacgtatatattattattcaatgtttttttggttttttacaatagatctctatggaataatatcttatatttcaatgttattttcttttttatagaatttagttctaataaattcatgtaatcgaaaggataagtttattagattgtcatttggcctaatatggtgctataagatagtttcccctgttaatcagacaatatgactaatgaatatagcaagtcttcttgaacaaattgcagataaaggttggtgtgtatgggatgatttccttacaccagaggcggttaaacaattgcgtgcttgttttggtaatgatgcacaacaagcacgtataggacgtcatgaaaacctattagcagaaaccacgatacgcagtgataaaattcgttggctagagccgcaaatgggagagccagttcaacattatcttatgcagatggaaagcattcaacgagcagttaatcgtgagttctttttagggctgtttgaatatgaagctcatttcgcttgttatgaaaaaggtgctttctataaaaaacatcttgatgcatttaaagaaaatgtcacaagacgtttaacgacagtgttatatcttaatgatgaatggacaccacaagacggtggagagctagttatctatgatctggatgataatcaattagcgacagtcgcccctcaaggtggtcgtttagtggtttttctttcagaacaatttccacatgaagtattacctactcataaagaaaggatcagtattgcagggtggtttcgagttaatggtgtcagagataattttctcgatatcgccagctaaatgatgcaataaagtgttattgtcgtaatagaaatagcatgggattaggcgcgtttcttatattaggctatatagcttaatgataagagcgcgctttttctgttattaatgactgaaaataatgtgtaattaatggaatagagtgaaaagagaataaagaaaattgttgattttctggtggttaacaggacaataaaaccaaactttatggggtaaaaatagaatgaatgaattttcgattgtctgccgtttattaggtacattatttcaacgagcaccgagtgatgctattttagcaccgatcataaccatgatagcggaagataaactaagccaattatggccattagagcaagatgagctgttcaaaacgttaaaaagtagcgtagctgatttagcggcagtagaagctgactaccaatcgctttttgctgacccaatacccgcagtatctctttatgcacatgattacggtgatataaaagagcaagatattcgtcaattcttagtcactcgaggtatgcctgtcaccggatcagcgacagatagctttggtgcgctgttacttgcggcttcttggcttgaagataatgccgcacaagatgaagtattagcacaaacacagttatttgataactatctattaccttgggcgggaacctttttaggtaaggttgaagcgcatgctaaaacaaatttttatcgtactttagcagcaattacgcgtggtgcactttctgcattacgggaagaattatcagatgaagaaaacgaaaaataaataattaaatcctataataaaaacgttgatgttttcaacggcaccctagaatagctatcttatttgggtgccgttccgcttattgcgcatgttatggctagaaaataattaatttatatcagcattaatcctatgactcatcatcatgattaatattcaatatatattataattatttatatttataaaaaccaatgcccttattacgataaaaatatttaattaaccattttgtgattaaagttggatcacaaacttacccggtttaacttcaatcccttttgctaatttaaaggcagccgcttctgcactatttttttcagggttgagcacataaacaggctgattatcaaaataagtcgcaatagtcgtatctaagtaaggttttaatgccattacaaccggctccattttttcaggagacactttatagctatcaattttcattgacttgatatatatcgccccaagctctgcttgataaaagggttggcctgataaagttaaattcacattcgcgccagttttgccaaacaaagaatcaattttaagagaagcactaccagaaaagctcacttttccaggctcagtacgaccaatttggatcgctaaatcacttaatgtgatatcggcagaaacaacaccgtcttccccaatgtgtttttgtaatcccgatttttgactcagatagtcattaattactttttcactgacatcaaattgtctgatttgatcacagccagtcactaaactagttaatacaaataaagcagtcaaaaaaatagctttcatacacactccttgatggtaaacacgctaagtgtacctgatctctatggggtaagcatggctgtttcaatttttttacgattaaattgtcgatgtagtgcgtaaagggtgataaatcctattgagcctaataaaaaccaaggtagttcaggcagttcaagttgtttgccaatatcatacatccatccccctccggtatagccaatcgcgccaccaaaagctaaccctaatcgactaaaacccatataactgcctcgagcacgaggatctgctaaagaggcacttaatgtttctcgagcaggctctgcggtaatagtgcctaggtaaaatagggtgataataagaaatatggcatgtaatgagtgggtgatccccacaggaaacatactgatactcatcaaaaataatcctgccattaagcgttgttctaggcgaaaatgtttttcactccaacgggcaataggataaagcagtgttaatgataataaagcttcaattgcatacatccattttactgcgctaggggtgccggcaatttcattaacaacgatcggaaacatcagcataacttgtaccgatagtacaaaatatcccgtaagagtaagaacatactgaacaaaacgtttatcaagaataacgcgttttagcccttcttttatcggtgttctcgtggttgatatacgataggcaggtagtaaccaagcattaaaaatagccgcaagaacgaatatgccagcgccaacccaacaaactaaatggaaatcataaaggagtaaccaactgccaattaaagccccaataacggcacccgcactatcttgcattaataataaagaataaaaccgaccccgttcataagggcgagttaattttatcacgagggcagttcttggcggatcaaataaagtgccaccgagtgcagataaaatacaagataaccaaaggatccaaggtttatccgctaaagccattaatgcaaagccaagagcacgtaatagcataccggtaataatcatcggcttagcaccaaatcggtcggcgatggcaccgccaaaaatacctaagccttgctgaacaagttgtcttaacccaagggcaaagccgacaatcacacccgcccagcctaattgctcaacaaaccgaattgatattaaagggaatacgacaaaaaatcctaaaacaaccagcatattgtcaaggaggagaaagtatttccccaaggtgcgagcttgtgttaccagtgccattattcaccataagttaaacaaatgatttaaaataaataaaagggagggcaaagacagagctttgtttatctattctgtctgttaattttattaattgatagcttattatagatgatatttttttattgatgataatgctagaaatagtaggattacttcagaataagattaatcaaaaatacaacaggactgatatgtttggttatcgtagtgggatccctaaagttcgttttgaaacgaaaagaatgatcgttcgcttagcttatgaaagagatgcagagaagttagctaattactatacactaaaccgccatttcttgatcccttgggagccagtaagagataaatcgcactatttaccttcagggtgggagcaccgcttactttatataaatgaattgcatcgccaagagagtgcttttcattttctattattgacgccaaaagaagatgaagtcattggggtcgctaattacagcaatgtcatgcgtggtgcttttaatgcctgctttttaggttattcagtcggtgagaagtggcaagggcaaggctatatgtcagaagcattgcatgaaacattacgctttatgcaacgtcaacaaggaatgcatcgtattatggcaaattatatgcctcataatttacgcagtggtaatttattggctaaacatggctttgaacgagaaggttacgctaaaaattatctgcagataaatcaagaatggcgtgatcatgtacttaccgcattaacaactcgtccttttcccaaaggataatggcgaatatacattaacatattgagttttttgactaaggtgaactattttttgatcaaaaaaacagttaagtgtattcctagcaagttgatgattgatttttcagtgtgagagacggagtatagtctctttctttttattccttaccacaacaaacactagaatgaactatgaatttacttaaatcactggctgcagtgagttcgatgacgatgttttcacgagtactgggctttattcgtgatgcgattattgcgcgtatttttggcgcaggtatggcaaccgatgctttttttgttgcttttaaactacctaatctattgcgacgcatttttgccgaaggcgcattttcacaggcatttgttcctattttagctgagtataaaagtcaacagggagaagaggcaactcgtacctttattgcttatgtatcgggaatgctgacgttgatcttagcgattgtcacagtaatagggatagttgccgcaccgtgggttatttatattacggcacccggttttgctgattcagcggataaattccaactcacaacggatctattgaaaatcacctttccctatattttattaatttcattagcatcattaacagggtctattttaaatacttggaatcgcttttctgttccagcttttgcacctacgttgttaaacgtgagtatgatcttttttgctctcgttgttgctccttattgtgatccacctattatggcgcttgcttgggctgttttagcaggaggaattttacagttggggtatcaacttccgcatctgaaaaaaatagggatgttggtattaccgcggatctcgtttaaaaatagcggagtgtggcgtgttattaaattgatgggacccgctattttaggggtttctgtcagccaaatttcgctgatcatcaatactatttttgcctcattcttggtgtctggctcagtctcttggatgtattacgccgatcgcctaatggaacttcctactggtgtgttaggggtggcattaggaacaattctattaccttcattatctaaaagttttgccagcggcaacacacaagaatatcagaaattaatggattggggattaaggctttgttttttattggctttaccttgtaccttgggtttggctttattatcaggccctttaaccatttcgttatttcaatatggtaattttaatgggcatgatgcgctaatgactcaacaagcattagtggcgtattgcattgggttaatggggttaattattataaaaatattagcaccgggcttttattctcgccaagatattaaaaccccggttaaaattgccattgcaacgcttattttgactcaattaatgaaccttgcttttgttgggagtttaaagcatgtgggactggctctttcgattggattagccgcttgttttaatgcaggaatgctattttggcaaatccgtaaacaagatatttatcaaccattagcgggttggcctatctttttattaaaacttgctattgcgttagctgtgatgagtgctgtattagtcggcatgctatgggtgatgcctgattggcaacaagggaatatgctaatgcgtattttacgtttattacttgttgttgtagctggtgccgcaagttattttgtcactttatatgctgttggatttagaccgaagcatttttctctacgcgcattataattttattgtcaaactggcgcctcactgagtgtaacaaagtggggcgttgtctatttattaccactatttaacatcacctatagttagtgtttttctcttattttagacaaaaaatattgttatctagatcacatttataccatgtaatttacgcaataaaatacatgattaaattttctagcgaatagtcgtgaaggaaaacaagagataaatatttatttttttattaattttttttctgtcaaataaataaattctccattttttgcctatattagcccatatttaaccgttaattaataagaaaaacttaacatattttaaaggtgatgggtttagacaaattgtgtactttaagtaatattttacataaagtaaaaaaatagacgctattttctagcaacttacgctttgacaaattatctttttttagataaactctcttgtgttgtttaggtttaaaaattgacacatctgttaaatatttcttactaaatgatgagatattacgaatatttcaaaatgttgagctatattttaaaacatttgaattctttgatttgagacatattattattttttcattcaggtagattaacagtgactgtaaagttatttgcttgttatcgttcagtactactgaaagcaatcatatctattttgtctgcgcttcggatagataatgcgattgctagggataagcagtgaacagtagattgtgttaataatgaaatttattttggatctgtgattggtaagtagttataactactcattttaggtctaaaacctgatagtggttttttcatttctcccgtctttgttttctgtttttccctctcttttcttattcttgaatacctttctttattttttctattaatagctctataacgcaaattattttctatctaatttattataattaactaagttatcaagcgttataaccgttgaatatgtagaataaaaactactaaataatcatttaacgagtattttatcacactaaaaaataaagtgtgttttaggagcgattatgaaaaaggccattatcctttcggtatcattagccacattatttcttgctggttgcactgcagatggaaaaatcaaaacctctcaactgacacccgttaactgtgtcggcgtatttaataaaactaatgaacaagtcagctttacggcaaaagatgttgatcagcgcttatacagcccagataagccaatagacagtgttgatggttggattgatgttaaagatgtttctggtcttctctgtgaggatgtgatcacggctaatgaagactagtgatattagcatcaaggcatggtttattgttagttaagattaacggttaatcaactcgctattaagtttctatctattaagtttctataatgaaaaaccgatggtgatttcaccatcggtttttttagataaatataatggcttaattacattctatcgacagtttcaatacctaaagtctctaagccttgctttaaggttcttgctgttaaacgtgctagcttaagacggctttggcgtacattgtcatcttcggccgatagaatagggcagttctcgtaaaaacctgagaaggactgcgctaaatcatataagtatgcacacatcacatgaggtgtaccttcacgtgcaacctgcgtgatagtctcgtcaaactgtactaaacgtagtgccagttgtttttcatgaggctgtgttaatgagataggctgggttaatgcgctttcatctatatctgcacgtttaaagatagaggcaacacgagtataggcatattgcatataaggtgcagtattaccttcaaaacttaacatcagatcccaatcgaaaatataatcggtggttctgttctttgataaatctgcgtatttaacagcaccaatgcccactacacgagcaatattatttaattcctcttcatccatatcaggatttttttcgcgaattaatgttaatgctctttcatgagcctcatcgagtaagtcagttaaacgtactgtgccacccgagcgcgttttaaatggacgcccatctttacctaacatcatgccaaacatatggtgttcgagtgacatactatcaggaatatagcctgctttacggacaatagtccatgcctgcattaaatgctgatgttgacgtgagtcgatgtaatataatacgcggtttgcatgtaattgttcatggcgatatttagcacaggcaatatccgttgttgtataaaggtaaccaccatcttttttctggataatgactcccattggttcgccttccttgtttttatattcatcaaggaaaacaacagtagcgccttcactttcaacagcaagaccttttgctttaagatcagcaacaatacccggcaacattgggttataaagactttcacccataatatcatcttcggttaaagtgacattaaggcgttgataagttagctgattttgttgcattgtgatatcgacaagcttgcgccacatagtacggcagtattcatcaccaccttgtagtctaacgacataattacgggcacgttcagcgaatacttcatcttcgtcataacattttttagcttcacgatagaactcttcgagatccgctaatgccatatctgcggcattttcattttgctttttctctaaataagcaatcagcataccgaattgcgtaccccaatcaccaaggtgattagcgcgaataacattatgacctaaaaaagagagagtacgtgcgctggcatcaccaataatggttgaacgcaagtgacccacatgcatttgctttgcaacgttaggtgatgagtagtcaatcacaatcgtttcaggagttaccttggtaatattaaggtgctcatccgctaatgcgaattcggcttgttgtgcaacccaaacgggtgataagaagatattgataaaaccagggcctgctatttcaactttatctgcaatatctgtgatatcaaggtgttccagaattttttctgcgagttgtcggggtgggatacccattttttttgccgctcccatgacaccattcgcctgatagtcaccaaattgcactttagctgactgacggacaagtggttcgctatcagcaggggcgccagcagcgctcatcgccatactgattttttctgaaagaaaagcctgaatattcaccgggttaccttaaattattgagaaaataaaacctgacgacattagccagacaggtttttataaagaatatgaatttaaccttgaatttataacatattctagctagaacatgctactatctgcgccttatctttaagggtttttctctgttttttctcttaggttacttatcatggtgcttttttccgcaattcctttcttaaataacttaacgcaagagcttcctctatttgcaaaaaatttaactctactggcgaataaactatccctcgaccttgatgcttatcaaaccgatcatatatcgttacgttgtcacgatttggcgttagcagaacagtggcgtaatggcttaagtcaatgtggcgagtgtatttcagataatatgattaatgggcgacctatttatctctttaagctagcctcacctttaacactgttaggccagcaaatatctattgttgagttaccttatccaacagataaaaaataccaatatcaaggttgggaacatattgaacaggtaataaatgttgctcctgaaaaattagttgaaaaggtgatgacattattaccccatcctttacctgaagggattagaattaaaataagtgaacctaaagctgaaaaagaacgtttacctaatccaaccgttgccataaccgatggtatcgttaccataaagtatcacccatattccttactgaaaattgtagaaagtgagtgttgaacaacatttttagaaaataaattgcttgtatcagcacaaaattctgatattggaattgaatgagtaacgatattcgacaactattattaacaattactgatagtagttgctgagaaatatcgttattttctaattgctttctgtattaaggatagagaggggtggtatggcaaaactggagatttgttgctttggtgcagaatgcgcactgatcgcagaacgttcgggggctgatagaattgagctgtgtacaagcccgtcagaagggggtgtaacaccgagttatggaatattaaaacaagtcatagatctcgttcgtatccccgttcatcctattattcgtccgcgtggtggtgatttttgttatagccaagccgattttgctgcgatgaaaaacgatatcagtatgatccgtgatatgggtttttccggtgctgtggttggtatattaaatgaagaaggtcacattgatttacctaaaatggcgattttgatggaattagcagggcctttagccattacgtttcatcgcgcttttgatatgtgtattaatccattgctagcgttagatcagctgactcaattaggtgttgctcgtattttaacctcaggtcagcaagctaatgctgaattaggcttacctctattaagaacactgaatgaaaaaacccaagggccgattatcatggcgggggcgggagttcgtttaagtaatattcagaaatttttagactcgggattacaagagatccatagctcagcgggcaaacaagcaccctcgacaatgaattatcgtaaagcgggggtcaccatgagttcagacagcgaagtggatgaatttacccattattgtgtggatgaagatgtggtgggggcaatgaaggatattatgagtatttatacaacatctgttaattaatataatcttttataaatcgaaagggagtgatagtgtttcactccctttattaaatttattgaccaatagctagattattaatagccagaccaatccaagatggaacggggcgatgttttccgtcaggttgtgttatcaaagagcaccacaaacctgcttcgttacaagatgaatcaggccttgtatcacctctcactgtgaattcatctgcctttaaagccagcgcagctgaaccaccgccatctaactccatagattgcgcaatgctaaggccataatataaatgatgcagatcattgcgacttattccctctctataactgccaccttggaaaatataaataaggctattgttatcatcagcacccattgcgagtcgggttgtctctgaatcgccagaatcaggggtaggaagcggtgttaatccgcgaacaggtaaaccggatcctgatatagcaataaagtgatatcctgataaagagagttcattagcatacagttcaatcgcaggatcagatacttttttgctatagtagatatctatcctagatgtttgatctaacacccaaaacagtgcatctaatgcgatttgttcattattgttattgataaagtaattaggccctgcaaaaaactgattgggctcgttatgagtaccatgagtgggcccttgcgcgatattatcgtaatatatccctaatggcactgagcaaagattactctgccaagtggtgttattgagttgaggacgaacatcaaaatagtttgcatttaaagccactaacggtttatctagtttgttccatgcctgttctggggtataaagctccgctgtctgtgaagtgccatcctgtgttttagcatttgtattaccttcgcagcgagctgcctcgccttgatgagtatcacctaatagatgaggaataaggtatttttctttttcatggatcctaggaataatcagtagattgccgttattggctaatgtataggttcctgagcctgcattcattggtatttcataatgaccaccaaaaacgatatgacttggttttcctgttgttaatgtttctgattttgcgttctcaatgagagaaagcattgcattataggtgatatgagattcgatataagcctcgccattacgagcattatcccctgttatctgaaatgaacctactgctttaccatgctccctaaaaataagccatatctgttttatatctacgttataatctcccgaacgcactgcgctaaactgcaatctctgcacatgttcatctatgttattaatattttctgttgatcttatttcttgtgttttccctgttaatttatgagtggcattggcgataatatcaatagttatcccatcgtatttcgcccctttaaaggatatcttgtgtagataaacatcgataaataatggtcttagatcttttctatcacaaatatcagtacttaactttaaactgaccgatttattattgatatttcgattagacatattcacttcttttcttccccagcaattccattttgctgctggcgcgggactattatcttgctttgatggcatagtggcagagaaggcaggaaatatactgcaccctataataatggctaataaataatgttttaacataaagttttctccatttagctaacaataatttgataaaaattaaaatagatcctcattaataatgaataagttaaagattaaagttagcaaatattttactgctttttatattataaaattcctcacagtggagaataatattgaaatagtgtttattgagttaagttttataattaacagactgttaaaaataaatatccaaaaaataaaataaaacaatagaaactgctaataatatttatcgttaagattaaaaataaaaagattattagtagtaaagacgctaaaattttttattgcttctagcgtctatactgttttaacctgggggctaattagtttggtatgttgctattagagtaataatgtatttgttataccacattgtttaacaaaatcttcatcgtgagagattaataataatgttccttgatattgagataataaattttccaataattgtttagagtctaaatctaaataattatctggttcatctaataataaaacggcagggggttgaggactataaattaatgctaatagtgttgcttttaattgctcaccgccactgagtgtttctaaaggaaataaagacttgttacctcgaatacgtaacatacccagttttgtgcgccactgctcaatggtcattaatggctggtattgatataacgcttcagcaacgggtaatgatttatctaataaagttaaatgttgatcaagatagcaataatttgggttgagacgatattcgccggataacggggatagcttgcccattaaacattttaataaggttgacttaccgctgccatttttaccttgtatatgccaatgttcaccaccataagcggaaaaggagtagggagtttgcttgccaaaaggtaaaacaagctctgtggcaaatacatttaaccgatggccatcgccttgatagtttaatattaatttttgctgatgaatatgagttaactcttgttctaactgttgtttttgtgactgcatatcatccataacgcgctgatgtcgtttagctattgatgactgttttttctcagctcgattggtttgcatatcaagaagtaacagtgattgagagccgctgtttcttatcttttcaccttgtttacgtcgctgtaatgctttttgtaatgttacatgttgttggcgtttttcctgttttatttgactattgatacgctcatttgcagcttcgattgaggctatttgcgcatttttttgtgtttcataaagcgaataattaccgccatattcttgtaagcctttttcactcagttcaaatatattttcagcataagataataaatgtcgattatggctaataaataatacacctgatttatgatgcattaattgttcaacgagccattgctgaccttgatgatcgagatggttatctggttcatctaataatagaaaatgatcgtcatgtaaaaaagcctgacataatgctaaacgcgtttgctcaccaccacttaagtggggaataggtgtatcaagtgaaaccggcagttgtgctgaatgaagtaaattttgccaagtcatgggcaaatgccacttatcttcaagtaactcaaaatcttctaatgaagcactgccgttatcaacccgcttaaatgcttgaaaaaaagtctctatacctaaagcatcagcaatggtattacctgttaggcgagtaagctggtcgacatgaataaaaggcatacgccacatgatatggcctgatgaaggcaatagtttttgtgctaacaattttaacagcaccgattttcctttaccgttctgaccaattaaagcatttctttggcaagtcagtgaatgagtcagcggtgggaaaagcgcttcttgattgaattcaatattaagctgagaaaattgacaggcgatcgtcataattaagcctcctaaaaaataggtggcagacagcaatgatcttaattgagtttatagagcaataaacgagtgtctgccagtaacagaaaatggataccaaaacggtattgagagaattttctggcagaatttagttcattgtagggaagtacctcttggagagaaaaaagataaaatcatgaagaattataatgacaaaaaaaccttaatcaatactcaaataaaatttattgtttatagacacggggattttatataaacagaaaataaaaccaacaggttataaaaagggtattattgataaataccctttttatagaaatgactcgtggttaattaaggtttagtcgcaattaaaattgcccgtttaggagctggatagccttcaacggttttggtgtgatcgagaggatctaagaatgcttctaatgaatcagtcaccatccaatccgttttacgttgctcttcgagtgatgtgacattttcatcaacaatgcgtacatctttaaaaccgcatttttctaaccatactttgagcattttggctgacggtataaagtacacattacgcatctgtgcataacgctcaccaggaattaaacattggaattcatcaccatcaatcacaagactctctaatactaattcaccaccagaaacgagctgatttttcaattgccaaagatgatcaagtggtgaacgacggtggtaaagaacccccattgaaaataccgtatcaaaagcatttagttctggcatttgttcaatgccgacagggattaaatgggcacgctgatcgttacctaataattttctgactgcttcaaattggcataaaaagagctgagtgggatcgataccgacaacaaaatcagccccttcaccaagcatccgccacatatgataaccactaccacaaccaacatctaaaactaatcggcctttaagaggcgaaagatggggcaatacgcgatcccatttccaatctgaacgccattcagtatcaatattgacaccataaagagaaaaagggcctttgcgccatggcattaacgcttttagaatattcgttaaaccaagttgttcaccggtacttaatgctggggttttattggcgataacaccttgctttaaattaagttcagtgggagtaatctcaggtaagttttccagcattctttcccatgaagcaaaatggccatgtaaagcatgggcgcgccattctgataattgtgccggcagcgtatcaagccaatgaaataaccgttcatcttgcgcaatatgttgataaaatgagctaaaatttatcatgattattcgcctttaatggctaacagagagccaaaattaaaacattggaaccaaacttcagcatgaggaaaacctgcttgatgtaagcgtgatttatgtgtttcaacaggatcagtgagcatcacattttctaacatactacgtttttgactaatctctaattcactgtagccattagcacgtttaaagtcgtggtgcatattaaacagtaattcaccaatttgtttatcttgaaaactgaatttttctgataacactaaaaccccaccaggatttaacccttggtaaattcgatttaataatctttggcgattatcaggggctaaaaattgtaaggtgaaattaaggacaaccatcgaggcattattaatgtcaatatcaaggatatcgccttcaataatttcaacgggtgttgctgctttataagcatcaatatgacgttgacaacgctcaaccatcgcaggtgaattatcaacaccaataattttacatcccgctacatcgatattacgacgcatggaaagggtagcagcacctaacgaacatcctaagtcataaacttggctgtgaggggtgacaaaacgacccgctaacatgcctatcatggaaataatattggagtaaccgggcactgagcgtttgatcatatcagggaacacttcagcgactttttcatcaaagcgccagtcaccaagattagcaataggtgtcgcaaataagttgtcttgtggtgctgattttgaattagacataactaaaatagacttaaagaataaaagaagcgggtattctaccagaagcgacgttgctcacaaagttgcattatttagaaataaattagaaaaacaggtaaaccttttcgataccttgccgttattagactcaacagcaaggatgtctattgtgatcatggatgatcatattttccttgtggtattaatagtagaaggaaaaaatttgtatccaaggaaggaagtaaatattagcaaggatcattaagaccattgataaataggttgctgccatgccagaacgacgccagcgtatctcgcggtgtttcaacccgtaagagtgaagaagacgaccggctattaaaatggagccacaaatatgtaccatccaaacaaaggcgccattcatttccatgataagtaataaaatcatagaaatagggatgtattccactgcattaccatggacgcgaatagcggtttgtaactcataaaaaccaccatcaccgtatgcaactcgatattgtgttctaagttttacaacatttagggacaatttaatcaataatagtgcgcccaatacgatataaagcgagctaaccatcttttctccattgccaaaactaaaaaaacggcgaatttaatgataaacctcaaagcgatttatgtcgctataaataattattattaattaattatttggggattagcaaatccttgaaaagatgtatcatataatctaggtctatactcttatcgtcgggaagaattttcgttataatgtctgccttttttttgacactactcgaaaaagactattgccaaaatttccgcagcagaaagcacaacaagctgagtaaaaggatattgtatgcgtactaattattgtgggcagttgaatagcgcccatgtgggccaaaaagtgactctttgtggttgggttaaccgccgccgtgacttaggtggacttatctttattgatatgcgagatcgtgaaggtatcgttcaggtcttttttgacccagagcagaaagaggcattttcacaggcttcagaactgcgtaatgaattttgtattcaagtcacaggaacagtacgtgctcgccctgatagccaagttaataaaaatatggcaacaggtgaaattgaactagcggcagaatcgctgtctatttttaaccgttctgaagcgctacctttagatagcaaccaaacgaatacagaagagcgtcgtttaacttatcgttatttagatttacgtcgccctgaaatgtcacaacgcctaaaaactcgtgcgaaaatcacaagttttgttcgtcgctttatggatggtgaagggttccttgatgtagaaacgccaatgctaactaaagcaacgccagaaggtgcgcgtgactatttagtaccaagtcgtgttcataaaggtaaattctacgcattacctcaatcaccacagcttttcaaacagctgttaatgatgtctggttttgatcgctattatcaaatcgtaaaatgtttccgtgatgaagatttacgtgctgatcgccaacctgaatttacccaaatcgatgttgaaacctctttcatgaccgcagaacaagtgcgtgaagtgatggagcgcatgatccacgcattgtggctagatatcctgaatgttgatttaggggcattccctgtcatgacctttgctgaggctatgcgtcgttacggctctgataaaccagacctacgtaacccaatggaactcatcgatattgctgatttagtgaaaaatgttgagtttagcgtctttgcacaagcggctaatgatgaaaaatgtcgtgttatcgcgttacgtgtaccgggtggtgcatcgttaactcgtaaaaatatcgacgaatatactcaatttgtcagtatttatggtgccaaaggcctagcgtggatgaaagtcaacgaaaaggcaaaaggtatcgaaggggtacaaagccctattgctaaattcctgactaatgatgtggttaacagcatcttagcggcaacaaatgcaacagatggcgacttaattttctttggtgcgggtcgtcaaggtaccatgagtgatgctatgggagcgttgcgcctgaaagtcggtcgtgatctggaattaactgatcttaacgcatggaaaccactgtgggttattgatttcccaatgtttgaagaagatgaagataccggcagcctaagtgcaatgcaccatccatttacttcaccaaaagatctcacaccggcagagctaaccgcacatcctgtaggcgctgtagctaatgcctatgatatggtcattaacggttatgaagttggtggtggctcagtgcgtatccatcgtaatgaaatgcaacaagcggtatttagcattttaggtattactccggatgagcaacgtgagaaattcggtttcttattagatgcgctaaaatttggtacaccaccgcatgcagggttagcatttggtttagaccgcttagtgatgttattaacaggaacagataatatccgtgatgttatcgcgttcccgaaaaccacggcagcggcttgcttaatgaccaatgcaccaagttttgcaaatgaagacgcgttaaaagagctggctattcaagtgacagaaaaagaagttagcacagataacgagtaaatgatgaaatataagcacccagtatgtgttttagttgttatctatgccaaacagactaagcgggtgcttatgctgaagcgtcgagatgatcctgatttctggcaatctgtgacagggagccttgaagagggcgaaacaccttatcaggccgcattacgagaagtgcaggaagaagtaggaattgatatcataaaagaaaatcttgagctggtggattgccatcgttcaattatttttgagatattcgcacactttcgccatcgttatgcgcctaatgtgacacattgtcaggaacattggtttatgttagcacttccctctgaacgggaaattgaactgactgagcatacgcaataccaatggttagatgcgccactggcggcaaaattaactaagtcagccagcaatcagcaagcgattgaagaatttgttatttaattattagaccacgtttggagatattttcatggcaggtcatagtaaatgggccaatactaaacaccgtaaagcagcgcaagatgcgaaacgcggtaagattttcactaaaattattcgtgaattagttacagcagcacgtttaggtggtggtgatcctgcaactaacccacgtctacgtgcggcagttgataaagcattatctaacaacatgactcgtgacacactaaaccgcgcgattgctcgcggtgcgggaaatgatgaaaacgataatatggaaaccatcatttatgaaggctacggccctggtggtactgctgttatggttgaatgtttaagtgataatcgtaaccgtactgtttccgatgttcgccatgccttcaccaaaacaggtggtaacttaggaacggacggttcggtatcttatctctttaccaaaaaaggtgttatttcttatgcaccgggtgttgatgaagatgccgtcatggaagccgcactagaagcgggtgcagaagacgttgaaacttatgatgatggtgctattgacgtttacacaacccctgaagctttcggtgaagtaaaagatgccatggatgctgcgggttttgtcgctgaatcagcggaagtttccatgatcccatcaacaaaagcagagcttgatattgataccgcaccaaaattaatgcgccttatcgatatgctagaagatagcgacgatgtgcaagaagtgtatcacaacggtgatatctctgatgaagttgcaaaacaactggaagatattctgtaattggtatcacgataacggccaatagtggtgttttacactgcgttgaatagtgcgaagagaagagcagagcaagcgtatttgctcttttctctcgccatcgaccttatccgccataggaattgttatggctattattttaggtattgaccctggctctcgtgtcacgggatatggcgtaattcgccaacaagggcgacaacttatctatttaggaagcggatgtattcgtacacaggttcctgatctaccaagccgactgaaacgcatttatgcgggagtcagtgaaatcatcactcaattttcacccgatgtattttctgttgaacaagtctttatggcaaaaaatgcagactcagcattaaaattaggccaagcaagaggtgtggcgattttagcggcagtcaataatgatcttcccgtatttgaatatgcggcacgtcaagtaaaacagagtgtggtaggaacagggggagcagataaaagccaagtacaacatatggtacgctcaatcttaaaactatccgcagcgccacaggcagatgctgcagatgcgctagcgattgcgattacacactgtcactttaatcaaaacttattgcgtgtaggtgatccgcgtcttgttttaacgcgaggcaggttaagataggctatctgttggtaaaacagattagtttttcgcaggctggatatacgtccagctttttttatgttataaatttggcgtcaatatttttgcggaggcgttagggtgataggacgtattagaggcgttattcttgaaaaacagccaccagtggtgctgatcgaagcgggtaatggggtgggttatgaaataaatatgcctatgacctgtttttatgagttacctgatattggtcaagaggcgattatctacacacaatttattgttcgtgaagatgcgcaattactatatggttttaatcaaaaacaagaacgggcattgtttcgtgaattgataaaagtcaatggtgtagggcctaagctagcactggctattttatcaggaatgtctgcacgccaatttgtcaccgcaattgaaaatgaatccatctcctcattagttaaattaccgggagtcggtaaaaaaaccgcagaacgattagtggttgaaatgaaagatcgcttcaaagggcttaatggcgatctatttgaacaaaacggcgatattgagctaccagccagtgcatcatcgaaagcgccatctgctgcagatattgaagcagaagcttccgctgccttaattgccttaggttataaaccacaagaagctgccaagatgattagtcgggtagcaacggcgggtgctgatagtgaaacacttatcaaagaagcattacgcgcagcgatttaggagtaattgattgtgattgaagcagatcgcctgatttcagcagatatacaacaacctgaagaagaaattatcgatagggctattcgtcctaagctgcttgctgaatatgtgggacaaccacaagttcgtgaacagatggaaatctttattcaggcggctaaactacgtcatgatgccttagatcacttacttatctttggtccgccggggcttggtaaaaccacgctggctaatattattgccaatgagatgggcgttaatttacgtacaacctcagggcctgtattagagaaagctggcgatcttgctgctatgctaaccaatcttgagcctcatgatgtactgtttattgatgaaattcatcgactctcgcccgttgttgaagaaatactctatccggcaatggaagattatcaacttgatattatgattggtgaagggccggcagcacgctccattaaaatcgacttaccgccatttactttagttggggcgacgacccgagcgggatcgttaacctctccattacgtgatcgttttggtattgtacaacgccttgaattctataatgtcgatgacttacagcatattgttgcacgtagtgccagctttatggggttagaaataacagcagaaggggcgcgacaaattgctatgcgttcacgaggtacaccgcgtattactaaccgcttattacgccgagtaagagactttgctcaagtcaaaggtaatggcgaaattgatgaagatatcgcgtctaaagcactcgatatgcttaatgttgatgctgccggttttgactatcttgaccgaaaactactctttgccattattgataaatttatgggtggccccgtagggcttgataatcttgcggcagctattggtgaagagcgtgaaactatcgaagatgtattagagccttatttaattcagcaaggttttattcaacgcaccccccgtggtcgggtagccacaaatcatgcttatcgtcactttaatcgcattatggaagcaccgtgatctgataaagtgctttggatatcattgggcgatggtgtttaatttcgcccaatcattcaattattttgccttcctctattctcattctcaatatatctcatctctatatttacaccttattatataaaaataattttttaatttataactatcgttaacataataacaatagaaactcagacgattaaattaaaacttcgctatctatcaatcgttatttttcctactcgtttattgaatttatttattattaacgcccataaaatgagtattggtacgtaaaaataagaccgaaatatacgcatattgagtgtgttaaataaaaatagtggcttaattagcatgatattttaattaaattgagcttaacagctaaatatattgactaatttggactgctcatggaaaaaggacagtataattcaatgtgattaatttttaatactttaaaatcaatggattatatgtgctgtttctcatttaacatttctgttacaaaatatatttttatgtacatagtgtttcttgggctgcgagcaatttgtctatttattcatcatattttatgctgataaacactttttatgactgtttttacagcatgatatagcgatatttcaaccagtttacgctaagtgacttatcctagagagatacaaaaaaaacgggctgtttacagcatattgataagattttattatcctttaccgaagtcttaccgtgcgcactggctaagatgacagacatgactaacggattgtttttaagacaatcatttaatttaatttgtcgtttttgataaaaggatattgttatgccaactccttgctatatttccattgaaggaaaaactcagggcaacatcactgcaggcgcgtttactgcagattctgtcggcaacatttatgtacaaggtcatgaagaccaaatgttggtacaagaattttctcacgtggtgacggttccgactgatccgcaatcaggccaaccttctggccaacgtgcgcataaaccgtttcgttttaccgtggcattaaataaagccgttcctctgctgtataacgcattggcttccggcgaaatgctgccaaaagttgagttaaaatggtatcgcacgtctgttgaaggtaaacaagagcacttctttaccaccacactgactgacgcgacgatcgtgaacatcgattgccaaatgcctcattgtcaagatccggctaaagccgacttcacgcaacttatcgaagtctccctctcttaccgcaaaattgactgggagcacactgttgctggaacgtctggtgcggatgactggcgtgcgcctctcgaagcgtaataccgttatgacgagtccttggggactcgtccttattttgtattgttcccttttctttatccatttttgcatggaggcagattatgcttagcaaagatccgaaatcaacgcccattgacccggcatccgttttaaaagatgaagccatcaatcaagtgaaaaatagggtgcaatccaaagtgaacgaaacgctatcgacacccacgcaaaaggtggccgggatggcctcagcagcggcctcgctcactcaatcagccagcgcatcggccaatcgcgtgacggctcatcccctgatccacggtggcggttttaccggtggacaaacgttcgctgaaaaccaagcactccaagcggcccatggggcgttacttgatgcattaggcatggacagcctcgaaagtggtttggtgttcacttgcaccattggtggattgcctgacgacacctttcaagtcaccgaatttaatcttaccgaaggattatcctcgctattttcactgtccatcagtgcggtcagtgccttaccctttatcgatttccagcgccatcttggcttagcctcatcattaacggtcaaacgcgatggggtgttgatccgcaaagtcaacggtatcttagctggggcagtacaaggcaataccgacggagtgaaaacgtggtatcacttcgatattcgccctgaaatgtgggtgatgaccctcaatcaagacagccgtatttttcaacatcaatcggtgccgaccatcttaaaaaccttattggatgaggcccatgttaaagcggattgccaattctaccgtgaagatctacaccctgaacgtctctacaccacccaaaaacgcgaatccgcatttgatttttggtgtcgactggcgtttgaagagggcattaacttctggtttgaagaagaacaactgttttacagcgatgaacatatggggatgacggcgggtattcacctcacctataacccgcaggccgacaccgatatcagcgatagcactgccatgacttggcaatatggcgaatatttgtgtgtggatgaaactatccataaagacaacaactttgttcgtccttcttatccgttgtctcatgaaaacaaaattgagcagggaggacagcacagtgtgtttgaaagttatggtcgttttcaattagacgatgaaggtcgccccctaacacaggtgcgctttgagcaattacgtaacggcagcaaagtggggcaagcgacaacaaactgttttgcgctgatgcccggcaaaatcttcaccttatctcagcatccccatctgccgatgaatgatcgctggcaagtgatcagcgtcagccatcatggtgtacagccattggcggacaatagcgggggcgaaggcacacaactgtcgaatagtgtctcctttattccgggcacgcaagagtggcgtcccccttatcgttataaaccgacggccgacggcgatgaagtggcgacggtggtgggaccgccgggggaagaaatctacgtcaatgaatatggcgccgtgaaagtgcattttcattgggatcgtcggggaagtgccgatcacagtgcttcatgctgggtgcgggttgccatgggttggagtggaaatggctatggtttttctgcggtaccgcgcatcggcacacaagtgttggtcagttacctgaatggggatattgacagaccgataattaccggttgtacctatgatggtcgtaacgcaccaccgattaagttcccagagaataagacacaaactactttccgtagccaaacccacaaaggggaaggttttaatgaattgcgttttgaagatgcgggcggtaagcaagaggtgtttcttcatgcgcagaaggatatgaatacccgtgttcttcatgatcgcactacccatgttttacacgatcatgttgaagtgatcgaaaacaatcaacagatgcaggtgaaaggcgctcgcacagaaacgatagataaagataacagcgaaacggtaggccaacataaaaaaattactgtaggcaaaacattatctatcaatgtcggtgaagtcattgaattacgttgtggagcaagtgtgctacgaatggataatggtgggcatgtcacgattaatggtcaggaatttaagtttgaagctacaggtcctgtgaaaattacgggtaaagatatcgatttaaactaagggaatagtgatatgaaagtgagtaacacaaccccatttccttatcttttataccaaaaagtaggaaaaaaggatgagctgtttaatgtgatcgcattgcgccaaacttttcggctcaagactggcgggcattactcggatttaaatgaacagcaataccctttaaacatggccgatcgttactatcatgcaccggaaaccagtagtttaatcgaagaaacggatttagtgtggacgcgtccttgcactaatatccatatactgggggttgcgcgccctaaaggcaatcagcctacggcacaatggcgagcaggtattcgcattgaaaactttagcaaaacgtggtctttgtttggccctcactattgggaataccaagaggatcgatggagcttgagtgaatcaatacctgttgatggggtttctttacgccatgagttggcttatggaggaacatggcagtctccccagcaagaacaacaacaagtaatagaaaatcctattgggatcggattttaccccgatgtcgaagcacttgataaacaaaaacgttatccagcccctcagattatggaagatattcgtaaaagaccacttgatacgttgtctattgatactcgacaaattagcgaaggtatggggcctatctcccgttggtgggcaggacgtgttgaatatgccggaacatatggaaaagagtggcaagaaaaccaattcccattttatccggatgattttgatgaacgttttttcaatagtgcgcacccgtctttacgttatccagggtatttgctgggtaatgaacctatattattggaaggtttattacctgaatcatcgcgggtcgttacagcgttacctgactatcgtgtgaaaatcatattacaagacatcgaaggtgagcttttctctttgaagccagatttagacacactgactattgacttagatcgtcgtcttatttctgtcgtgaaacgacttgttatccccgcaaaatacccgattgtggaagcattaataggcgtttgggttccagcagaaacaaaaggagcttgttgtaatggctgataaacatgttggtgacggtgaaaaccaattcaaagttgttgcaaccacccctgatgtttgtcaggtagggtgttctgctattccttttgatagttttcaaagcttagatgcacaaaagcaatatgccttgagtgttaaagcacgtggatattgtaccctgaatgttgggtcaataatcaaaggaacgcaaagtaacacgggggccggtgtattatctggaacctcattaggcggtggagattgccaaattattacaggaagcccttcggtccgtattgaaggtcaaccagctgcacaagatggttcattagtcgcaatgaacaataacaatacattagggactttaatcactaatgttgcaccccctgcggagccgattgaaagcaataaaatcccctgtaataacccgcccgtgacatcagaattgttagaatcgctgcaagagatgcaacgaaaagagcaagaaagttttattgggcgactccgtcaacaaaaacaacaagcggataaaaaaagagatgattctctaaatgatattgacaaacaattaactggatatattgataatattcgagttgatcacattaatacagattattcatggtggaacagtttatataatacttcaatggatggaataactggcctgactcgtggtggtcttggttttgttgaaagtataacaaagtcagctgtggaagcttatcattacataaatccaactgttctagttcaaaacgtggctctaaatgcgagcaaaaaaaccatcgagggacttattgaagcagaaaactggaggttggggaataactgtattgaaggtgttaaggaagacgttaaagccaaatatcgtgcattaggtaaacttattgatgaagaaaaagaaaaattagagaataaatggaaaaaaagtgatagcgataaagtcgaaatagtaacaagaggtgggcttgaaatagcgactattgccgctgcttttttaaaagtggggaaagtcgctgaaggtgctaatgctattaataaagtagcagaaggaactaaaataactgaaatatctgaaggcacttctgcggtaaataaagctactgacgtaataaaagcgacagagaccagtaatatatccaaaggaagtgaggcaatcaaaggggcagaaatctccgccacagagaaaggaagtaatgccgctaaaggtactgaggtgatccaaagtccagaaacaccgaaaataacctcatcagataatggcattaaaattgaaggaaaaacggaaagcgtatctacagaaacgccacctaataaagtcaataatagccaaacggagaacaagtcgacatccagcagcaaagagtccgatggaaacagtacttctagtgcaacctgtaaaggtgaacctgttaatgtggctactggtgattttatccaacagtggccaattattcagataccgggcttgttgccgttatctctacatcgtacatataaatccacatcaaatgcaaagggactttttggaccgaagtgggcagacgaatggtcacgctgtttacatatacttgatggaaacatcatctatcaagacagtgatggtgctaattttacatttataactcccacagaggagatccgtgcaagaaatgcccatgctccccattttttactcaccggacaacgtgatggcgatttaaccctttttgatagtacgcaacaacagtttctacattttaatcacagacaaggaaaatatcgtcgattaagtgcaatcactgatttaaatcagcatcgtattgattttatatataacgagcaaagtcagcttgtcagtgtgaagcgtcatgatggcatagcgttaatactcgaatatcaacaggataaattagttcgcatttgctctgaaagcacaacctcatctcctcgagattttgtacgttgcgaatacgatactcacggttatcttagtcaatgtcatgcctatcaacaaaaccacttatggcatcgttattctcctgagggactcatggtcgcttggggggatactgacagcacagaactgacgattgattatgatgaacaagggcgtgttgttgctacacattcaccgtctggtttttggaatgatcgctttatctatgatgattatcagcgcatgacaacctacattgacgctgagggtggattttcacgttattattataatgatgataatctggtgactcgcactatcgatccattatggcgtgaaacgtatacggaatgggaacagcggaaaaagatagcagaaatcaatgagattggtgagcgcacagagtatggttatcactataatggactgcttgcctatatctatttacctgatggtaaagccatttactatgattataatgactatggtcaacttacccatttcacatcggcctttggcgacgaatggcagctaagctatgatgaaaatggcaatttaaccatagtgacagatccgcaagggcgtcagcaggtctatgaatatagccaacatggtgaattgctcaaagccattacgcccaatggtgcgcaatggcaataccactataaccctgcacatcaactgattaaaaccaccaatccttatcaacacagcacagaatatcatagtgatgaattggggcgtttactgcactacactgatgcgttaaatcacaccacacgctatcaatacagcactgagcatgccagtaccaacggcagtctcagcaagattttattacccgatggggtcgagcaacagatagactatgacagtgaacgccgagttatcgcggtgacggatggtgaaggaaaaaccacccgttatcgttatgggccttttgatgtcttactggcaatgatacgccctgacggcagtgaaattcgctttgaatatgattcactgacacgacttaaaaaagtggtgaatgcgaacggcgaggtttatctttacgaacgggataaagcgggacaaatcattcgtgaagttgattttacggggcgtgagatttgttatcgctatgaccgactaggacgtcgcattgccactcgctatccggataaccatgaactgcgttggcgctataatgaaagtggcttagtggttgaacaaagcgaatggtttgaagatgagcaagaaagccgctgtttatcgacgactcaatatagctataacgcacgtcaacaattgataaaagcgactaatcctgactcggtggttgaatttgagtatgatgaccaaggtcgtttatgcagtgaacgtattaatggacaagagattattcatcaatggaatgaagctgataatacgctggcattgactcgttttggtgagcgggagttgcattatgcttttggggcgctgggggaattaacttcactgcaagtcaatcaacatgcaccacttcaattcagctacaatgcagtaggacaagagtatttacgccgtagtcgcgccggatttgtcaattccagtcactatacggctaccggtttactggctcatcaacgagcagggcgaggcaccgaacagtttttacaatcgatacaagcccatccccaacaaccgccattttgtacggatgtgcaccgcagttatcaatatgatcgcgcttataatgtggtgggcattgaagatgatcgctggcgacagacacgttatcactataatgccaatgaccaaatcactgagacacaatacagtccacaatggggtaatcaggacgaaaaattccagtatgataacaacctcaatatcacggagcacttgacaacgccgtcctcgtcgatggtgccttcagaagcacaaggggcgatgctacagctatttcagcaacagcaagcaggacgggtgactcgccgttacacagcgaagggatatcaagattaccattatgatgttaatgggcgattagctaaaaaaattgtccatacacgcggttttcgtcccagagaatggcgctatttatggaacacacaaaatcagctgaccgcatgctttacgcctaaaggggattgttggcactatacttatgatgcttttggtcgacgtctgagtaaaaccaaaactgtcgacagtgacttagcccatattgacccattatttccgcagattaagcctaaaatcaccacgtggcgctatttatggtcgggagaccaactgatagaagaaacgccgatatatgccgatggcactcttgctaatgcgcaacaagttcaatggctgtatcaacccggagaaataacgcccaccgcgcgttatcaacagggcaaactgcactatgtggtcaccgaccaccaaggcaccccgcgagagatattcagtgaaggcgggcaagccagttgggcaggacgattgaatacgtggggccaaatgcagttttggcgttaccgcgacggtaaagctgagaatgatcctaattataccgaatgtccttttcgctttgcggggcaatatgaagatgaagaaagtggcttgtattataatcgctttcgctattatgatagggaaacagggcagtatctttccccagatccgatagggttattgggtgggctgaatccctatggatatgtgcattgcccgacggggtgggttgatccgtttgggctggcgggtggtaaggggaataagggtgctccagtaacatctagttttataaatgatgatattattaaccattccgcaaaaggagattggaaagaagctagctctatgcctccaagagatagaaaaacctttccaaatggaagattaagtggtggaggtcatggtcaatcagctatattagaactggaagcaaggggaatcctttataatatagagcacacatatccaaatggtgttcgagtgggaaatataccgagtcacgcatcgaaagcaaaacgctcagggacagctcagtcatggtttcctgaaaactggagtgacgctgatattaaagatgcagggcaagcaatatggagatcatcgaatagtgtccgagttgatatgccttctgggggagttatggtctcaggtacgcataatggtgtatttattcgtgttgtccgcgaccctaaagggggaggctctatattccctgataacacaattcaaccatgatggacttgtactaatatgaaatatagaatgaatgaaattaaaataaaatgtgatgaaatccttctagtcaatatgtggtataatttggatgagtcatttttttggccaattatggaattaattgacctcgatgatgattcacttataaaaatatatagcactattgaagaaaaatatcttaaaattttatatcatgaaacagttattgttcctgtagttgaatcaactcaatgcgaaaaatttgttgattatattaaaagcgctagtaatagtaaatcaaatttcattgatgacattctagttaatgatcttgaatcagctttgtttattaattatgaagatcctaattcccctactaaaataaaatattttagtagggtttattcaaagttaaaaaaaatcataaaaaatgaccaagacaaaccttgggatgaaaagagggttaaagaaatattgaatcagattgtaattatctcaagtgaaaacaagtctgagtactttaattatatacaagtatattggcttagtatttattttaatcagtacagaaagtttagtagtgatatgaatagtatagagttatacaaaaaaaagttatcagatatatttccatgtgctagactttaatgatatataaaatattatataaaagtaattgcacagtattcaataattgaagaggaagtgacaatttcccttggtgaagctgtacttacatgttttatctgtgatttaaataatctaataaaattaaataatatttatttagttgagcttgaaatcgaagttttcgatgaattaagagctaagttggccacctatattttaccaaaacaaattggagtttttttcgtatatttttaatcaatttaccaaaatagttaatggtgaaaatttaacttttataactaaagattctctttttgcagggcctagtggaaagtttgctcactttgaatctacttgggaagtgatgaatgatggaactttaagattaacaacgatgatccctaaattatgattgaacaatttgataaccaaatattagatatttttggaatagagcaagatagctttgatgtggattttttgcaatggaattatacttttagtaaagaaggcatcaaattattttttgtatactctatggataaaacagtatctatttcactgtatttaaatgatatttcaattgctttttgttttggttatggattggaaacattgagtataaaagataataaaatttatggtgactttgattctaattgcggtaaaagaacgttagaactagatcctataaatattacatttaaatggatagataagctttcataagccaacaatagctgtttagtttagcatatcgctccttgtatattcaaaaccacaaggggcgatgctacagctatttcagcaacagcaagcaggacgggtgactcgccgttacacagcgaagggatatcaagattaccattatgatgttaatgggcgattagctaaaaaaattgtccatacacgcggttttcgtcccagagagtggcgctatttatggaacacacaaaatcagctaaccgcatgctttacaccgaaaggggattgttggcactatacttatgatgcttttggtcgacgtctgagtaaaaccaaaactgtcgacagtgacttagcccatattgacccattatttccgcagattaagcctaaaatcaccacgtggcgctatttatggtcgggagaccaactgatagaagaaacgccgatatatgccgatggcactcttgctaatgcgcaacaagttcaatggctgtatcaacccggagaaataacgcccaccgcgcgttatcaacagggcaaactgcactatgtggtcaccgaccaccaaggcaccccgcgagagatattctgtgaaggcggacaagccagttgggcaggaaggttgaatacgtggggccaaatgcagttttggcgttaccgcgacggtaaagcggagaatgaccctaattataccgaatgtccttttcgctttgcggggcaatatgaagatgaagaaagtggcttgtattataatcgctttcgctattatgatagggaaacaggacagtatctttccccagaccccatagggttattgggtgggctgaatccgtatgggtatgtgcattgtccgacggggtgggttgatccgtttgggctggcgtgttgtccaccaccaaaaataaaagctacacaaatcggattaagaaaccctaaacagattgatggtatgaaaaaagatatgcttgacggcacttttgatttttcacttcccaaaaatcaagttggtggctttgtagattccaatggaatttattatatgggggaagggcatcatagaatggttgcagctcaagaaatatataaagaaacaggcgatgctaaatatattaataaattaatagaaaatggttcatggacaagaacaaattcaccaccaactgatgccagagctatgccatccagaagtttctttagtaatttaagaaacaaattaggattttaagaatgagaaaaataagtatatattcaaatatgttatggaagtcattatcttatataagaaatgtgcaaacacactcttgctttagaaaagcctttgataagtcttgttatatggaggctgagctattacataatattgttatatctcttcctgaagaagaaatgactgaacatgatatattttttttaaatagtcatgcgcgattctatttggaaaatgctgacaaaagaaaatgtacaaattatttttctcataaagatgatataaaaaggctatttagtctcgttcctgagcacttgaaagaaaaacttgaatggaatggcccagaataatattttgagtaattaaatctagccggaaagatcccgagaacttccggctgacttatttttaagggttgctcagttgtgctagctcagtctcccctttagtcgttggtatatttccgcatcagctcgcgcatggtgtgtttgatggcactgagttgcgcttgctgttagtattgcagcttaattgttcgaatgctttcactatcggatatcaatactaaactctcgtttaagatgaacgtattaatggacaagagattgttcatcaatggaatgatactgataatacactggcattgacccgttttggtgaacgggagttgcattatgcttttggggcactgggggagttaacttcactgcaagtcaatcagcatgcaccacttcaatttagctacaacgcagtaggacaagagtatttacgtcgtagtcgcgccggatttgtcaattccagtcactatacggctaccggtttactggctcatcaacgagcagggcgaggcaccgaacagtttttacaatcgatacaagcccatccccaacaaccgccattttgtacggatgtgcaccgcagttatcaatatgatcgcgcttataatgtggtgggtattgaagatgatcgctggcgacagacacgttatcactataatgccaatgaccaaatcactaagacacaatacagtccacaatggggtaatcaggacgaaaaattccagtatgataacaacctcaatatcacggagcacttaacaacgccgtcctcgtcgatggtgccttcagaagcacaaggggcgatgctacagctatttcagcaacagcaagcaggacgggtgactcgccgttacacagcgaagggatatcaagattaccactatgatgttaatgggcgattagctaaaaaaattgtccatacacgcggttttcgccccagagaatggcgctatttatggaacacacaaaatcagctaaccgcatgctttacaccgaaaggggattgttggcactatacttatgatgcttttggtcgacgtttgagtaaaaccaaaaccgttgacagtgacttagcccatatagacccattatttccgcagattaagcctaaaatcaccacgtggcgctatttatggtcgggagaccaactgatagaagaaacgccgatatatgccgatggcactcttgcggcgtctcagcaaatccaatggctgtatcaacccggagagataacgcctaccgcacgttatcaacagggtaaactgcactatgtggtcaccgatcaccaaggaaccccgcgagagatattcagtgaaggcgggcaagccagttgggcaggacggctgaatacatggggccaaatgcagttttggcgttaccgcgagggcaaggcggagaatgaccctaattataccgaatgtccttttcgctttgcggggcaatatgaagatgaagaaagtggcttgtattataatcgctttcgctattatgatagggaaacagggcagtatctttccccagaccccatagggctattgggtgggctgaatccctatgggtatgtgcattgtccgacggggtgggttgatccgtttgggttggcgggtgattgttgtgatgagttactagttcttgctactaaccctagaagtaaaacagttcaagagatggctgaagatttagctaatcgaattaatagaaatacagtgacattttccacaccaacaagcatgggacatattgatttaagaggaagatctcactttgataaagtgacacaagctgatattccaacaccacatgttcaagtttcaccaattaacgttgctcctaatggaaatcgcttccctcttaaaaaactagaagcggcaaggccagccacaaaacaagatattagaacagcggaaaaactagcagaaagacaagggcttttaaaatgaatgatgaactaatttttcaattacaaaattggtataaatctaaatgtaatggtctttgggagcatgaatacggattagatatcagtacgttggataatccaggatggaaagtgcatattaatggtgaaaataagaaaaaaaaatcaaatattattattaataataatgatgatgattggttaaatataataacaagtgatatagagtttaaaggttatggaagcccacagaatttaaatactattttaaatcatgccattaaatggctaaatgatcctcaataaaacaatgatagagactgtaatttaaattgtgtattgcctacttttgatatgtatttcattgccaaaggtagactaatatccacattttactcgataaccaacgtctgcaatcgcaacttgatctcaccagttgcgtttgctgttgttagttttgttgtttaattactcggaggtctttgctgtccggtatcaataccaaacacttgtttaaaatcttcacgataaaggtgaaaactgtctcaaacctgcatcttttaaccacggactctaaggtgtatcggggcggtggcacagttttgttatcgctcctccgtgtaacagagcgtggcgctatttatggtcgggagaccaactaatagaagaaacgccgatatatgccgatggtactcttgcggcatctcagcaaatccaatggctgtatcaacccggagagataacgcccaccgcgcgttatcaacagggaaaactgcactatgtggtcaccgatcaccaaggaaccccgcgagagatattcagtgaaggcgggcaagccagttgggcaggacggttgaatacgtggggccaaatgcagttttggcgttaccgagagggtaaggcggagaatgaccctaattataccgaatgtccttttcgctttgcggggcaatatgaagatgaagaaagtggcttgtattataatcgctttcgctattatggtagggaaacagggcagtatctttctccagacccaatagggttattgggtgggctgaatccatatgggtatgtgcattgcccgacggggtggatcgacccgttaggacttgcaggtgactgctgtaatgaattaaaaattgtatatggagagctagactatctaaacagacctacaggtgtatgggccagaatagataaaagctttattaatacaggcactcatgctaacccaaatatacaacctcccggatttattacaggtcaaggttctaatcgagctagaggtcatttatttggacgtcaattaggtgggtcaggtgatgatgttagaaacttagtcacacttcaacaaaggcctgcgaacacaccatttatgagtggaatcgaaggccgaataagaaaggctgctgaacaaggtcaaattattgaaatgagttctgttccttattataaaggtgtatctagaattcccgccggtattacaatcaaagctgaaggaaccggcggattttatgaatatgttaccgtacttaaccctccaggaatgtaatatttatggatcttaaaaatttaaataacatattaccagtgccacgccatgtttatgaaacaggattaaatgccagctggccattgattgatgaaaaatattcatttcccaaggattatattgaatttacaactcaatatggcatagggaagatagataatttccttactctatttaatccattcattgataatgacaattggaacttttttaagcaaaaaaaatggattatctctgatttttctgaattaaatgaatctgaccctgattattattcgtttatcttatatcctgataataacggacttcttcctattggtatcactgagaatggtgattatgttttctgggttattacatcagataatagtgacctatgggatattgctgttattgcagctagagattcagatgtcgaatatcataaaggaaatcttgtaagttttattgaaggtatattatccaaaaaaatattaagcgcatgttttcctaagagttttccctcatcaaatataatatttgataataattattttaggtcgtgaataaagctagaagatgaagagtccccataaagttggactgttcattaagcggttttcaataactgaataactgaataactgaataactgaataactgagttctgtactctacagggctcagtcctttcaatttaaccttgattctctcatggttataataatgtatacattctttcacggtctgatctaattcattaactgatttaaattcttttccgtgaaagcactcagatttaaatatctcgaaaaagctttccattgacgtattatctaaacagtttccttttcttgacatactttgttttaagcccctttcctgtagctgctgttgataataatccatttgatactgccacccttgatctgagtgaatgagtggcttttcatttgtttttagctttgtaattgcttattttagcatcttatcaactcgcttatatgtggggcgacgttgcgtttgataggcaacgatctcaccattaaataagtccattataggagagaggtaaagctttttaccttgaacattgaattgcgttacatcactgacccacttctgattgggcttcttagttttaaactttcgctttaaaatattctttgcaattttacccacctgacctttataagaacgatatttcgttgtcctaatgcaggacttaagacctaatagcttcattaatcgttggacacacctatgattgattgttactcccctattttttagagctaaggagacagggtagtatctttccccagacccgatagggttattgggtgggctgatccgtttgggttgtgtggtacttcaaaacttaataatgcatcagttgaaaataacccccgattcttggttgatgctaaaggtcaagttttagatttagagtattttagaaatctaaaatttgatgggcagataattaatgctggaagaagcggtaataagttacctgcaataggagagcctggtacttactctaaaacaacaggcggacatgtaattgtttacggatctgatggtagacgaatggctgatatatctaaggagcgaattaaaattgtcgagtggaataaggatccaagaggacagtatcattatagaactggaagtgatacgaaatttgcagatagagaaataccagatgaaattaaaaagttattggagtgaaaatgaaaaattatccaagtatagtatctaatgatcttatagcgatatttccaactccttttccgttgaactatagcttacctaatcttgtttcgaattgtgtgggattagaagcagttttagcctatgcaggattattttgtcctgagattattgaaattgatggtgctatttatcgatgtgagaataatgatggaaaaatgacaccatatgaggggtacggtaaagataaaaaaaccttggaaaaggttaataacgttttttcattcaatgatttctttctatctacaactgaagatgctgcttgttctagtgaagtattaatgactgaattcagtgaggttctaaagtatttttggggtattagattaaaaagcctttacccaaataaaacatttgaatttattatcacggacgatggtctatatggtgaagaagggttttgcatgaccttttatgaagtcgaataataaacatttatagccagaaaatccttcaattttctggcttcttcgtttttaagagcagctcagtttaccctttagccgctgatagactcagccatcagctcgcgcctagtgtgttttattgcactcagttgcgcttgctgttgttagttttgttgtttaattactcggaggtctttgctgtccagcatcaataccaaacacttgtttaaaatcttcacgataaaggtgaaaactgtctcaaacctgcgtcttttaaccacggactctaaggtgtgtcggggcggtggtacagttttgttatcgctcctctgtatatcctccgtatgatagagaatagctctatttatggtcgggagaccaactgatagaagagacgccgatatatgccgatggcaatctttcagcatctcagcaaattcaatggctgtatcaacccggagagataacgcctaccgcgcgttatcaacagggtaaactgcactatgtggtcaccgaccaccaaggaaccccgcgagagatattcagtgaaggcggacaagccagttgggcaggacggctgaatacgtggggccaaatgcagttttggcgttaccgcgagggcaaggcggagaatgaccctaattataccgaatgtccttttcgttttgcggggcaatatgaagataaagaaagtggctttataatcgctttcgctattatgataaggagacaggacagtatctttctccagaccccatagggctattgggtgggctgaatccctatgggtatgtgcattgtccgacgggttgggttgatccgtttgggttgagtggaacgtctcaattaaatgcatttcaaaatgctaatttcgccgactcccaaaaattaactcagcatttcgaaaaacatggccatgagttcagagctacttcagaagctgaatatttaaaaattggccgagatgtaatagaaaaaggtcataaagttgagtactattacaaaccattagaacaataccgtactggctatgtaatgtacatgagaaatacgaaaagaggtgatgtacaaatggcatttgtaggtattaaccctcaaggtcagatagcaactatacacacaaaaagtggtaaagacgtttggaaattactcaatggtaataaagatgaaaaagttatcaatcttatacctagagatgctaatgggttataatacatgaaatattatgcagaagtagtttcattaaatccaaatgttgaagaagaagtaacgatttcacttggtgacattacacttacgtgttttatttgtaacctaaataatccaataaagttaaatgaaatttatttagttgagcttgaactcgaaattttcgatgaagtaagagctaagttggccactgatatattaccaaaacaaataggtgattcttttgcatacgaattaaatggttatttgctagaaaataaaattattatatctaatataattcttcaagatgatttgttatatgaaatttcattttatgaaaataaatatgtttgtatttatatagatagaattaatatttcatttttcaattaatataaggataataaaggtaatgtttattatccttttgaaattctatagtctatcggtaagctagttatatactctaccatcagttcgcaaattgagtgttttctcgtacagagttgcacttgttgttgattttgctgcttaatcgctcgaatatcttcgctgtctggtgtcaataaagcgtgacgctatttatggtcgggagaccaactgatagaaggaacgccgatatatgccgatggtactcttgcggcgtctcagcaaatccaatggctgtatcaacccggagagataacgcccaccgcgcgttatcaacagggcaaactgcattatgtggtcaccgaccaccaaggaaccccgcgagagatattcagtgaaggtgggcaagccagttgggcaggacggttgaatacgtggggccaaatgcagttttggcgttaccgcgagggcaaggcggagaatgaccctaattacaccgaatgtccttttcgctttgcggggcaatatgaagatgaagaaagtggcttgtattataatcgctttcgctattatgatagggaaacagggcagtatctttccccagaccccatagggttattgggtgggctgaatccgtatgggtatgtgcattgtccgacggggtgggttgatccgtttgggttgagtggaacatcacagcttaatcctgaaacagttgatttgtatagagctgtcggcccagatgaattaaacaatataaagcaaacaaatacttttagtaatccacccggaattgaaactaaatattttaccacttcgggtgaaagtgcttccgaatatgggaaaaaagctgttttaggctttggtgatgagccatataccattgttaaaactagtgttcctaaaaatttaatcagtgatcctaaattctatgctgaggtggatggtgggattcctgcttatgttctacctagcgaaattatcgcaggtttaaaacctaatgttttaaactattcacctttgccgagaaaataagatgaagaaagcttatgcaacaataattctctttgaaactgaattaggaggtcgtaaatctcctataatatcagatagatactatgcatgccctttgtttttcacgacacctaaagagctaactccacatggttttgattgtagaatgttagttaatgaagtaggtgttgatatatatcccggccagtctaaagataatattccaattatatttttatctccagatgaagtatttccatatttaaaaattggaactatttttgatatatgggagaatgggtatataggaaaaggtataatcacaaaaatataattcgataataagccagaagaacctttaatcttcgggcttcttcgcttttaagagtcgctcagtttaccctttagtcgctgatatacttttccatcagttcgcgaaagttttttatctcactgagttgcgcttgctgttagtattgcagcttaattgttcgaatgctttcactatcggatatcaatactaaactctcgtttaagatgaacgtattaatggacaagagattgttcatcaatggaatgaagctgataatacgctggcattgactcgttttggtgagcgggagttgcattatgcttttggggcgctgggggagttaacttcactgcaagtcaatcagcatgcaccacttcaatttagctacaacgcagtaggacaagagtatttacgccgtagtcgcgccggatttgtcaattccagtcactatacggctaccggtttactggctcatcaacgagcagggcgaggcaccgaacagtttttacaatcgatacaagcccatccccaacaaccgccattttgtacggatgtgcaccgcagttatcaatatgatcgcgcttataatgtggtgggtattgaagatgatcgctggcgacagacacgttatcactataatgccaatgaccaaatcactaagacacaatacagtccacaatggggtaatcaggacgaaaaattccagtatgataacaacctcaatatcacggagcacttaacaacgccgtcctcgtcgatggtgccttcagaagcacaaggggcgatgctacagctatttcagcaacagcaagcaggacgggtgactcgccgttacacagcgaagggatatcaagattaccattatgatgttaatgggcgattagctaaaaaaattgtccatacacgcggttttcgtcccagagagtggcgctatttatggaacacacaaaatcagctaaccgcatgctttacaccgaaaggggattgttggcactatacttatgatgcttttggtcgacgtctgagtaaaaccaaaaccgttgacagtgacttagcccatatagacccattatttccgcagattaagcctaaaatcaccacgtggcgctatttatggtcgggagaccaactgatagaagaaacgccgatatatgccgatggcactcttgcggagtctcagcaaatccaatggctgtatcaacccggagagataacgcccaccgcgcgttatcaacagggaaaactgcactatgtggtcaccgatcaccaaggaaccccgcgagagatattcagtgaaggcggacaagccagttgggcaggaaggttgaatacgtggggccaaatgcagttttggcgttaccgagagggtaaggcggagaatgaccctaattataccgaatgtccttttcgctttgcggggcaatatgaagatgaagaaagtggcttgtattataatcgctttcgctattatgataaggagacaggacagtatctttccccagaccccatagggctattgggtgggctgaatccatatgggtatgtgcattgtccgacggggtgggttgatccgtttgggttgcaagttgtaaatgcttcattatcaggaaatagtcactctacaagctcagcacaaggagctctgcttaaacaatattacagcaccgcagaaagtgctaatgatgttgtaaatatagtttaaaagcgacaggaaaattaccagataactatataacaaaagcacagacagaggctgctggatggtctagaggaaaagcgttaggaaattatattctgggaggtcaaataggaggggatatttttgctaatagcacgaagatattacctgatgtccctggaagggtatggtatgaagctgatatcggactgaataatagcatgtctagagcgaagcaatcaggtaccagacttttgtattctaatgacgggttaacttacgtaacttcaaatcattacgatactgccgaagcattaggcatttggaactgttgtaaaggaggttaataagtaatgaaagaaataacactagatgggaataaacagaaaacacctattgaagtgtatcaatttttttctgaggaatttgattttggcccgtactttgcaaataatcctgatgcgttatatgactttatggtgcctattgatgcagaagataaaccagtcattatattgtggtataatagtagtattttcaaggaaaagtatcctaaagaatttgcacagcttgtctctgtgctaaatagcataagtgaatttggaaaatttgaccaagacacttttcaatttaaaattctctaaatataaggccggaaaagtgaagtgaccccataaagttggatactttaagttaagcggcttgtaaagcctgatttcgatattcaaccagagtcaggccttttaatttaaccttgatccgtttggtattgtaatactcgatatattcctcaattttatcaatcagttcatcagcgttttgaaaatgatgcccatgatacatttctgattttaataagccgaaaaaggctaccaaaacacggtcaagctttaaatacaataaaaatagtcactgatgctaactcaaatagagtagtaactgcttttccaatttagaacaaataatataagggagataatatgagattagtatatttcgtttatcaagataaaaatgcttatgaacgacaaagtgatggtgttgagttctgcaaaattcctgagtttcataatgataaaatttatttttattgtgatgaatattccatgttttgggattctattgataaagttggaaatcctaatgattgttgtaatttctcattaaagagtagtattgtcccagctacattactagaaatatctaacaacgacctgatatcttatattgatacagtaaaagaatacgttatagaaaataacaaattaagtaaattaacatatattcatataaaataattacatcataagtgtctatgttcaaaattatgtttttacctacttttgatgtgacatttacaccgaaaataggcaattaattatctcttattcgataagcaacgcctgcaattgtagcttaatatcgcttaactgcgcttgctgctgttggttctgttgcttcatagttcgaatgtcttcactgtccggtatcaataccaaacactcatttaaaatattcaccgtaaaagtgaaatccgtctcaaaccttgtatcctgaaccactgccctttgaggtgtatcaccggcgatggtacagttttgttaccgtcccgccatgtaatagagacatataatagagaatggctgtatttatggaatacacaaaatcatctaactgcgtgtcttgtagatagaggttttcctgatgaaattagaaaattactggggatagaatgaatatatatgacggtatagtatcaaactcgttacttaagaagtttccatcgggttatcctgcaaatgtactattgactaattttgtggcgaattttgttgatttagaagacgttcttgcctgtgctggtttattttgtccaacatttattgaaatagataatgtactaatgaatatcttttagatatagactggagaccttcgttcaaaattgatggtcaatttaagttggcgctaattaaaggttttaacttggaaaattctgtttatttaggttcagcaattaatttattcgaattaaagaaaaaactcaactagcaatgcgcaaattataggatctcttgattaatatggaacaattactaaccaaaaccgaaatgccagaatggttttcttacccacgtgaatttctcagaatagttgagcaaaatttacttaattttgatccttggattattttggaaggagagcggctcagggttcgttttggtggtttaaaaaaaagatacccaaatagaaatattattccttttgcctgtcgggaagataatgatgatgtagcgtgttgggataaaaatagccgtcatcaggttattattattcacgattttgcaagtgaaggttatgaatatgtcggtaagtttgattcattttgggattggctcagaacggccttagaagcaactatcgaatacaatgagtaaatattaatgtatcaacaaagccggaagactgaagtggcaagttaccgttgatgggagaacctagaacatatttcaaagcaactggtgggcatattatagtcttcgatccagatgggtgccgcatagcggatataagtaaagaaagaataaaaatagttgaatgaaaccgttcacccaaaggacaatattttatcccaactggtagtgatacaaagtttgcgagtaaagaaatacccgatgtaattaaaaaattataatagcccttgctataaattagcaaaggctatttttttgtttataagataaacgctaaacaactactgctttgctggtacaagcaagctcaatacaaataaactactggcggctaatactactgatgggcctgcaggggtgtcatagaatgcagagaaagttaatcccccagtgatagcaaacatacctacagcgacggcaatcactgccatctgttctggtgaacgtgaaaaacggcgcgctgttgctgcgggaataatcaatagtgacgtaatgataagtgcaccaacaaatttcattgccaacccaattgttaatgcggtgatcatcatcaattttaaacgttcgcgttgaatattcacaccatcgacaaaagccatatcttgattaatagtcattgaaagaagtggacgccatgaacggataatcactaataaaacaataacgacaccaataaaaatactgatcacatcttggtaattaacggagagtaaatcaccaaagagatacgccattaaatcaacacgaacattggccattaaactgacgacaacaagccctaaagaaagggcgctatgagccatgatacctaacaaggtatcaacagaaagttgaggctttagttctaaccaaactaataaaatagctaacagcaaagttacggcaataacggcataaaaaggctctatattaaacagcaggccaaaagcgacccccaataaagaggcgtgggcgagggtatcgccaaaataggacattctgcgccaaacaacaaaggagcctaatggacctgcggccatcgctaagagcataccggcgatccagcccggtaacagcaactcaatcatgatgacactccttattatgttggtgatgatgacgataaatacccagttgttcagcaccacgactaccaaacatagctataaattcagggtgagaagaaaccacatctggtgtacctgagcagcagatatgaccatttaaacagagcacttcatctgttttagccataaccagatgtaagtcatgtgacaccattaaaattgcgcagcctaattcattgcgaagctgattaattaaatcatagagggctaattgaccatttacatcaaccccttgagtgggttcatctagaactaacagttgtggttgattaagtaaagctcgggcgagtaaaacacgttgtgattcaccccctgataatttttgcataggggcgtttattaattttgctgcattgactcgttctaaagcaggtaaaatatctttatctttaacacccggttttaaggtcataaaccgcttgactgtcaatggcatagttggatcgagatagagtttttgaggtacatagccaatacgtaaactatgttgacgttcaatctttccagaagagggagccaacaaccctaaaaccaaacgaataatcgttgacttacccgcaccattagggccaagtaaggtaagaatacggcctgcttttagattaaaagagatatcttttagaataacgctttcaccaaaagagacaccaaccgattttaaacgaattaagtcagacataaaattagcacttgcagaatcattgaaacgttataatataacatttccaatgacgtttcacgagaattttgcctatgttacataaaaacaacaaatttgcgcatggttttttaattaaatcatgtttagtgactgctatgatagcctcatttagttcatctgttcaggcagatgttgttgcttcaattaggccgatagggtttattgcggcagcaattgctgatggtgtaacgccaacagaagttttattacctgatggggcatcgccacatgattatgcattaaaaccttcggatttacgcaaaatcacctcagcagatttaatggtatgggttgggccggatatggaagtctttttagatagaccattaaatagacttagtgacaaaaataagctggctttagcggaaactgacaaaataaagtcgcttttattgaaagatgataatgacaatgtgcataaacatgaggaaaatcacgaacatcattctcatggtgattataatatgcacatctggttatcaccagagattgcgttgtcgtctgcaaaacagatccacgataggttagtgacgctctatccagataaaaaagaacttctggacgtaaacctaagtaaattcagcgaacaactcaagcaaacagataaaaatcttgttaatattctgtcgcctgttaaaaacaagggttattttgtctttcatgatgcttatggctacttcgaaaaacattataatttaaagccattaggtcattttacgatcaaccctgaaatacaaccaggtgcacagaaattacatcaaatacgaacacagttggttgagcaaaaagccacatgtatttttgctgagccacaatttaggccgacagtaattgagacagtggcgaaaggcactggagttaaaatgggggtattagatcccctaggaagtgggattgcattaactcaagatagttatgtgaaattccttacccaattagctaaccaatatgcgagctgcctgaatgaaacacaataaggaattaagaacgtgcagcagaagacgagatccattgcacaggtatatttaaatttacccttaccacataaaattatgcttggttcgttaactgcagcaacactggctgtcgcaatatggcggccagttgtgcttcacaccgaacaaagcagagaagttcctatcagtattcagactcccctaacaacccaaggggaaaacaccgacgatattattaccgacagtagtgatcagctaacagatgaaggacttgtaggtgctgatgatggtgtcgatactagcaccgcagtggcacaggttcctcatacttatattgtctccagtggagattcattaagttcgatattaacgcaatttggtatcgactcagctgatattgcaacgctctccaatcaaaataaagatctcagaaaccttaaaataggccaaccaataagttggaaacttgatgatgatggtttattgcaagagttaagttggggcgtttctcgccgagaaactcgtgtttatacgcgtacggaaacaggttttactgaagcaaaagagttccaaaaaggcgaatggaaaaatagtgtgaccacaggggttatccgtggtagtttctctgcaagtgcaacaaatgctggcttaactaacgcagaagctcgcgcagtgactaaagctttgcaatggcaattagactttagaaaattacaaagtggtgataaattctcagcccttttttctcgtgaagtcttagatggtcgtaccgaacagagcgaacttattggtgtgcggttacgaagtggtggtaaagattactatgcttttcttgctgaagatggccgctactatgatagccaagcaggtggtttagaacgtggttttatgcgttttccaacggtaaaacagtttagagtctcttctcaatttaatcctcgccgtatcaatcctgtcacaggccgtgttgcaccgcataaaggggttgattttgctatgcctgttggtacgcctgttttagctacaggagatggtgaagtcattgtctctaaatacagtggtgcagcaggtaattttattgctatccgtcatggtagccaatataccactcgttatatgcacttacgccaactgttagtcaaaccgggacaacgtgtaaaacgaggtgatcgcattgcactatccggaaatacagggcgctccacagggccacacttacattatgaattatggatcaaccaacaagcagttaatccattaacagctaaattacctcgtgcagatggcctaacaggcaaagagaagcgtgaatacttagctaaagtaaaagagatcatgcctcaattaacgttagataattgacattaaacaagaagttaaagacataaaagcggatgattgatatcatccgtttttgttttaatgatttttacgcctatttagaggtgtcagttcagcgagttatctgatgaataaagaaaaagatacagatagtaaagcgggttatgtaccgacttttcaccgcgcctatttgcatcctcgtcattggggaacctggtttggtgcaggcgtattgtgtgcattagcgtatatgccggtaaaatggcgtgatccgctccttgcttctataggtcgttttgttgggcgtaaagcgaaaagtgccagacgtcgtgcagatatcaatttaagatattgttttcctcactgggataaagcacaacgagaagatgtgcttgataaaatgtttgaaacagcgccacagtctttcgtgatgcttgcagatctttgtttaagaggggctaaacacacattacagcgtacctcttgggaagggatagagattatagagcgcttaaaagcacaagggcgtaatgttatttttatggtaccgcatggatgggctgttgatgtacctgccatgttattggcagctaaagggcaaaaaatggcagcaatgtttcaccaccaaaaagatccggtgactgattatttatggaataaagcacgttaccatttcggcggacgtttacactcgcgcgaagcggggataaaaccttttatttcaacggtgcgccaagggttttgggggtattatttacctgaccaagatcatggtgcagagcatagtcaatttgtggatttttttggtacctataaagccacattaccggcgattggccgattaatgaaagtatgcagagcggccattgtgccactgtttcctgtttactgtcataaaacgcatcaactaaagattattatccgtgagccgatggatgatatagaagggcaagatgatcgttatattgcgcgtcggatgaatgaagagctagaagcgttagtctcaccaacaccagagcaatatacttggatcttgaaactattaaaaacgcgtaaagagggggaaatagaaccttatgcgcgtgagaatatcctagactagtccattgctggtgaacgaataggaagataaaaaaacgggcactatttaaagtgcccgtttgctattttgctataaaagaataagaacgattattctacggtaaggatacgacaagtattggtacttccgatcgtgcccatctggtcaccttgcgtgactaagactaaatcacctgaaactaaaaagcctttttcacataaacgcataatagcttcattagcggcagcaataccgtcagtatgagtactgcaataaacaggcgtaacacctcgataaagtgcagtttggtttaatgttttctcatggcgtgacatagagaaaataggtaaaccggtgctaattcgtgacatcatacgggcagtacgaccggactcagtcatagcgataatcgcattaacgcctttcatatggttagctgcatacatggttgacatggctatcgcttcttcagcattatcaaataccatatctaaacggtgttttgatacattggccgcaggcattttttccgcgcctaagcagacttgtgccattgcggctacagtttcagcgggatattgtcctgctgctgtttcagccgataacataacggcatctgtaccatctaataccgcattggcgacgtccatgacttctgcacgagttggcattgggttagttatcatcgattccatcatttgagtggctgtgataacaacacgatttagctgacgagcacgacggatgagttttttctgtaccccgactaattcaggatcaccaatttctacgcctaaatcaccacgggcaaccatgacaacatcagaagcgagaatgatctcatcgataatttcatcattggcaacggcttcggcacgttcaactttcgcgacaatttggcactcacagcctgcatcacgtgctaagcgacgtgcataattaagatcttcgcctgttcttggaaaggagacagcaagataatcaacaccaattttggctgcagtaataatatcttgtttatctttttcagttaatgcttcagcagaaagaccaccaccgagtttattgatccctttattattagataatgggccaccgacagtcacttcagtgaaaactttcaggccttcgactttaaggacttttaattgaacacgtccatcatcaagtagcaagatatcgccaggaacaacatcggcaggtaaccctttatagtcaataccgactttagtttggtcgccttcgcctttttctaaattggcatcaaggagaaatttgtctcccacattaagaaatactttgccttctttaaatgtcgaaacacggattttcggaccctgcaaatcgcctaaaatagcaacatggcgaccaagtctagctgctatttcacgggtgcgattagcacgagcaagatgatcttctgcagagccatgagagaaatttaatcgaacaacatttgcaccagcagtaatgattttttctaggttattatcacgatctgttgctgggcctaaggtggtaacaatttttgttcttctgagccgtctggacatgcattactccgttgaccttgaacgaaaggtattggctattggataaaacggaggtaagtaacattctatccaatatgttaagtgaaacgcttcaagctaattgtaacatacttaggtgttttcatcatatgtgagagttagctcgcagttatgctaccatttttcaaaaagttatctagtcaagggcacactgctaaatgtgactatactaacaaattcatttaaaacggttacttatcaaagcgcgaatcgcgtaatgcttctttgacacgcttcaagttatctctaaattttggccctcggcgtaaaataaaccctgtagccagaacatcaataacggtaagttgtgcaaggcgagaaatcatcggcatgtagatatcggtatcttccggtacatcaagtaagatgggtaacgttgcttcggcggctaataaagagccagaagtggtaatcgctattactgatgcatcattttcacgtgcaattttagcaatttcgactaaatttttagtacgacctgtgtgagacacaatcaccacaacatcaccgtcgatactatttatacagctcattcgttgcatgataacatcatcaaaataggtcacgggaatgttgaaacgtgagaatttattcatggcatcatgtgcgacggcggcagaagcacctagaccaaaaaacgagatttttcttgcttgagtaagaatatcgacagctcgattaataaccgcaatatcgagattatttttgacattctctaaacccgccatcgcggattcaaatattttattggtataagcagagacagaatcggagtcatcaatgttacgattgacataaggtgtaccattggcaatgctttgtgctaattgtaacttaaaatctggaaatccttttgttgccatgcgtcgacaaaaacgatttacagtgggctcactaacatcagctgttttcgccataagagcgatacttgaatggatcacggtttgtggtgttgttaaaacaacctcagccacttttttttctgatttactcaagatgtccagactagactgaaccctttccaatatattcattaaatatacagatccttggctttgccaatttcaataaaaggagaaatctataacggttttatgaaaatatactacgcatataacagcacttacatcgctgacagccccttaaaagggcttttttcatcaaagtatgacctgtgtctaactttcaaagctgaaaacaattaacaaaactgttgtaaatttacatagaaatagaaaaagctagacataaaaaaccggtggttaataagatgtaaggggcgttaaagactaaaacacgcaagcgtatttactgcgtacacccaaaagagtacattaatacgaaattatgtaacaaaattacaaaatctcatcatgaggagacgtactatggcagcgatatcgactgctcaggcctgtgatctggttatcttcggtactaaaggggatcttgcccgtcgtaagttaattccatcactttatcaactggaaaaggcaggatatattcaccctgatacacgtatcatcggtgttggtcgtgctgattgggatgtagctgcttatacaaatgttgcccatgaagcattacaaacttttttaaaagaagagattaaccctgaaatttggcaacgtttaagtgctcgtctcgatttttgtaatcttgatgtcaatgaaactgaccactttattgagttagcaaaacatctaaaacaagacaaattaccggcgatttactattttgcaatgccaccaagtactttcagtgcgatgtgtaaaggtttgggacatgctaaattaaataaagagccaaaccgtgtggttatggaaaaaccactaggaacagatttagcgtcttcagtttctattaatgatagtgtggcgaaatactttaaagagagtcaaatttatcgtatcgaccactacttgggtaaagaaaccgttttaaacttattggccttacgttttgctaactccttatttgttaataattgggataacaaaacgatagatcatgtccaaatcacggtggcagaagaagttggtattgaaggacgttgggggtatttcgatcaagcgggtcaaatgcgtgatatggtgcaaaatcacctattacaaattttgacgatgatcgccatgtcaccacctgctgatttaacggctgatagtatccgccaagaaaaagtgaaagtgctgcgctcattacgtcgtattgatatgactaatgtccgtgaaaaaacggttcgtgggcaatatacggccggttttgtacaaggtaaaaaagtaccgggctatctggatgaagagggtgccaataaagccagtaatacagagacctttgttgcaattcgtgctgatattgataactggcgttgggcgggtgtacccttctatttaagaaccggtaagcgtatgccaagtaaatgctcggaagtggtggtctattttaaaaaacccgctctgaatattttcagtgaaacctatcaagagttaccacaaaataaactcactattcgtttacagccagatgaaggtattgatattgaagtgctaaataaagcaccaggtcttgatcataaacaccgcttacaaactactaaattagacttaagtttctccgaaacttttaatcaaactcatttagctgatgcttatgagcggttgttgcttgaggcaatgcggggtattcaagcgctatttgtccgccgtgatgaagtagaagaagcatggaaatgggtcgattcaattattaatgcatgggaatgcgataatgaattacctaagccataccaagcaggaacatgggggccggttgcatctgttgcaatgatcactcgtgatggccgctcttggaatgaaattgagtagggaatttcatcgtcagatatagtccctaactaatataaataacaccgtaaaataagaggtcgagttttgcggtgtttttttattaagcatgattactgcgatataaatgaataaattaataacaagttcagctaagaattgattaactatgcagtgtattgcaatcttcaacttaaaacctaaataaaaccaatcaattacctaaaaaatttttgcagaagatccttgctttaaataattcggcatgatagaaatatcatgtaacatttatccatattatatgagggttcggagtatatcgtgcggatggtctgcgcgatgaaagaataaataatcatgactagcgccaaaagcgtaaaagttaaacgttctacttataagttattcctttctgctattttatccagcgaacactactggtgtggcgcattatagaaatttctcatcctacttcctgatatatcaggaaataacgttgccttaacgttcggttttataccgccagaaagactatctgcatattctctatcttctgcgcaagaaacgtttaggcgtgctttaaacgtgtatgagagatgaaaaatgatttattggatatttttagttttagctattatctgtgaagtgatcggcactttatcaatgaagtatgccagtgtcagcggtggttacactggtatgatcgttatgtggttaatgattgccacttcctatatctttttagccatagccgtaaaaaaagtggcattaggtgtagcttatgcactgtgggaaggtattggaattgtcattattacaacatttagcgtgctttggtttggtgaatcactgtcagcattaaaattaggtggtttagcaatgttaattgcggggatcactttgattaagtcaggcactaaaaaatcggtggttgctaaaaaaacaaccgattcggtaaaaaatattgccggaaaagccaaacaggttgctactgtggtaaagggagttaataagccaatttcttctaatgttaaagaggcttaatatgttagctcaatttgaatggtggcatggcgcttttcttcttcttgctgttgtgcttgaaatcgtggccaatatattcttgaaaatgtctaacggttttagtcgttgggggttgggaatattgtcattgctttgtgtgttaggcgcatttagttcattggcaatggccgtaaaggggatagagctttctgttgcttacgcactatggggagcttttggtattattgccactatcgccgctgggtggatcttatttaatcaacgcctaaattataaaggatggagtggaattatattattattagtcggtatgataatgattaaattcgcttaactctattttacatagcaaagtaaagcatattaaataaaaaagctaagtttcttgtaaacttagcttttttgtttctataaatatctattaaaaatgatgtgtttaaaataacaaaatttatagtaaaaatagccttactatttcaacactaaaaagagtgaaatttgaagatgcaatagaatctatcactaacaacggtgagtatattgcatttattatgctaagcgcagttgctattaatttatcattgatgttacttttcatgataattaaaaaagaaaggagttgaaatgaaacggatattagtcgcgggagcaacaggatatttgggtggttttttaattcaagaattaaaaaaacaaggatattgggtacgtgttttagttagaaatcatcaacaagcgacaaagtttgcggatgttgatgacatattcatcggcgagatcacaaaaccagagcaactttctttgattgctcaaaatattgattgcgtgatatcaacggtagggatcactcggcaaaaagaagggttaacctatatggatgtggattatcaggcaaatgccaatttattagaagaagcgattaaatcgaaggttaataaatttatttatatctcggctattgatggcgaaacacaccgaaatctaaagatttttcaagcaaaggagcgctttgttgataaattaaaacaagccaatttagcatactgtattgtaagacctaatggttattttagcgatatgggggattttttacagatggcagcatcgggtaaagtttatttatttggtgatggcgaacaaaaaataaatcctatctctggaaaagatttagcgcaatttattgtcgagaaaatgacaaccaatataaatgaattcactgtaggtggaccggatattctatctttgaatcaaatatgtgaactcgcaggaagcgcattagataaaaaaattaaaataatccatttacccgatacgttaagaaaaataactatttttacgttacgtcattttacgagccaaaaattttatgggccattagagttttttttaacttttatggcaaacagtcatattggtatgtgttatgggcatgatcatttatcaaattattatattgaattagctgatccgacatataagagaaaatagtacccgcatgtgcgggtgctaataaaaaattagagagcagcgatgattttaatttctactttatattcaggatgcatgagttgagcctgaacggtacaacgtactggcgcgctccctttagcaacccatgcatcccatgcttgattcatacctgcaaaatcggctttatcggctaaaaatagtgttgcatcaaggatcttacttttatctgatcccactctttgtaataacacatcaatagctgctaatgtatctgcagtttgttcgattatatcccctgataagttttcaggaactgcagtgtaatagacagtatcattataaataaccgcttcagaccaacggtcctctggatcgatacgttttatagtcacgataaattctcctttgtattaacaacgtgggtggtacttttagctatccactggcataatttacgtcttattttataaaaagagtatgcctgtgtcagacgattttgcagaaaacgggattttaacccgacgcgttcctggatttcatccccgtgaagctcaacgacaaatggcgatatcagtaacagaggttattgataaacaaggtgtgcttattgcagaagcggggaccgggacagggaaaacctatgcctatcttgtgcctgcattacgttctgggaaaaaaactatcatctctaccggatctaaggcattacaagatcaactgtatagtcgtgatctccccaccataatagaagcgctagactacgatggtacaacggctttattaaaaggtcgctctaattatttgtgtttagaacgtttagatcagcaaatgctcagtggcggtgatttagaagcagaagtacttgctgatgttatgcatgtacgccaatggtcaacgcaaacagaagatggtgatattagtcgctgtcatagtgtggcggaagatagcaaagtatggccattggtgactagcactaatgataattgtctgggcagtgattgtcctcgctacaaagagtgttatgtattaagtgcccgtaaaaatgcgttagccgctgatgtggtggttgttaatcatcacctttttatggcagatacggtagtaaaagatactggttttggtgagctgatccccgatgcggagataatgatcttcgatgaggcgcatcaaattcctgatatagcgagccactacttcggtcaacagctcactagtcgtcaattattcgatctagcgcgagatatgattgtggcgtatcgcactgaagtgcgtgatcaagtgcaactgcaaaaaagtgctgaccgtttaactcaaatggtacaagattttcgtcttagcttaggtgatacgggttttcggggtaacttaagggaactattacaaaataaggaaaccaaacgctatttaaccttcttagatgatgcgttagagctaagttatgatgtaatgaagctctctttagggcgtagccaattactggatagtgcgtttgaacgggcaacactttatcgtaatcgtttaaaacgcctaattgatacgacgattgccggatacagttattggtttgaaagctatggtcgtcattttttactggcgatcacgccactttcggttgctgataaatttcgtgagctgattaagtcccataaaagtagttggatatttacttctgcaacactctctgtagatgaaaaaatgtcttattacacagatagattaggactggaaaatgccacgacattaattttaaatagcccatttgattatcaacatcaaacgttgctctgtgtaccacgttatttacctccgttaaatcaaccatacaccgcgaagcgtttagccgctatgctggctcctgtgatcttaaaaaatcaggggcgttgtttttttctttgtacctctcacgctatgatgcgtggattagccgaagagtttaaagccagcttaccacttcccgtgttaatgcaaggcgaaatggggaaatcgcaattattgaaaaaatttgtttcctcaggcaatgcgttacttgtcgcgacccaaagtttttgggaaggggtggatgtcaggggagatacactttcttgtgtgatcattgataaattaccctttaccgcacctgacgatccattattaagagcacgtattgaagattgtcaattacgtggtggtgatgcatttcgggatgtacaaatccctgatgcggtgatcactctaaagcaaggcgtcgggcgtttgatccgcgatatacatgactatggtgccattattgtttgtgatgatagattagtttcaaggccttatggggaagtgtttttaagtagtttgcccccatcaccacgaacccgttcattagaaaaaaccagttattttttaagccaacgggcacaacgaaatgaaatagtgtcggagtcataatagtgattacatatgatgtgtatttattctgttgaatactattatgatattattctttctctttttacttattgaatctgccggagttatggcgtgtcactgcgaattttagcaattgataccgcaactgagtcttgtactgttgcggtttggaatgaaggtgtcgttgcttcacgttttgaaatttcaccgcgtgaacatacacaaaaaattttaccaatggtgaaaagtgctttagaagaagccaatttatcactgcaatccttagatgccctcgcttttggtcgtggtccgggcagttttaccggtgttcgcattggtgtcggtgttgcgcaaggtatcgcactaggggctaatttgccactgattggtatttcttctcttgccaccatggcagaaggcgtctttagaacaacaggcattaagcaagttttagtcgccattgatgcccgtatgggggaaatctactgtgcccaatatcagcgtaatgacgctggcatttggtctggtgaagaaacagaagcggtaatgaaaccagaacaatttgccgaaacgctacaagctaccacaggtcgctgggcaattgcgggtacggggtggcaagcttatcctgatttagctttatcattgccttttaccgtggttgaaacgcaaattactttgcctgcggcacaagatatgttgccacttgccgttacagcatggcatgaagggaaagcaactaaagtagaagaggccgagcctgtttatttacgtaatgaagtcacttggaaaaaattaccaggacgggaatagattgttagcgattttctgttagaagtgacagagtgacgctatacttatcttagagtgtaacgtacttaatgacgtacaaagaggtggtttatgaacagacaattaaactaccgtttggtaagtaaagcgctatttttatctggcgctctattactaacgggctgcgtctctatacctgaatctattaaagggacaacagcaactcctgttactgacttaaatgtagttctagcggcaccggagctttatgtcggtcaagaaggtcgttttggtgggcgagtgatagaggttaagaatctaccttcaacaacccagttagaaattgctgtgatgccactttctcactatgatgcggctcctgagttacagcaaccttctgttggtcgtctttatgcgaatgttactcattttttagatccaacagattataaaaatcagtatgtcacggtagtgggtacgatcaaaggtgtaaaaacaggcaaagtgggtgaagccgtttatccatttttacgtatcgatgttacaggaatgaaacgctggacattaacgcaacaagttattatgcctgcgcctgttatgacatggggatactatggtaatgccccttactggtataattatggctatggtggctatggggcatatccatatggtactggccaagttgtccccgttttggagtaataaactagaataattgttaatgacgatataatattttacctttatgagtttgaaacggtgtataatcaatacctgtaatatattagatggcaattatctaatataattattaaagatgaagacaacaaaagagagggcggttttgaccgccttcttttttgttaaacataaaaagaaaaaatttagtgatacacttcgcatcttcacaacagaaaattgtttgtgctggtaggatgagttaatactttgttaaaaagaaacataatattaaccaagaagtgcgattaatcaggagtactactttggaaaaagtctggcttaaacgttatccggcagatgttccggctgaaattgacccggaccgttttgcatctcttgcagagatgcttgaaaacgctgtcgcaaattacgcagatcaacccgcctttatcaatatgggcgaggtcatgacttaccgcaaactagaagagcgtagccgtgcttttgccgcttatttgcaaaatggcttaggattgaaaaaaggtgatcgtgtcgccttaatgatgcctaacttactgcaatatcctatagcgcttttcggcattcttcgtgccggtatggtagtggtcaatgtaaacccactctacacaccaagagagcttgaacatcagcttaatgatagtggcgccacagctattgtcattgtttctaactttgcccatacgctggaaaaaatcgtctttaataccagcattaaacacgttattttaacacgtatgggagatcagctatctcgtcctaaagcgacactggttgattttgtggttaaatatatcaagcgattagtcccaaaatataatttgcctgacgcgatatcatttcgtcgagcgatgcatttaggctatcgaatgcaatatattaagccagaaattactggagatgatttagccttcttacaatatactggtggtaccacaggaattgcgaaaggcgcgatgttaactcatcgtaatatgttggctaatctagaacaagctaaagccgcttatgttcctgcacttaatgtagggaaagagctggtggtaaccgctttacccttgtatcacgtttttgctttaaccgtgaactgcttgttatttattgaagttggcgggaaaaacctactgataacgaatccacgagatgttaaaggcactattaaagagttatcgcgttatcctgtcacggcgattaccggggtaaatacactatttaatgcttggctacataatcctgagtttcgtcaacttgatttttctaagctcaacctttctgttggtggcggaatgcccgtacaaagtagtgttgcgaaagagtgggaagaattaaccggtaagcatctattagaaggttatggtttaactgagtgttcgcctttagtaacaggtaacccttataacctgaaaaaatacagtggtagtattgggcttcctgtaccttcaacggaagtaaaatttatggatgatgaaggtaatgaagtgtctcgcacagaaggcggtgaaatgtgggttcgtggccctcaggtcatgaaaggctactggaatcgccctgatgcgacagcagaagtactacatgatggatgggttgccacaggtgatattgccacaatggatgatgaaggctttatccgcatcattgaccgtaaaaaagatatgatcttggtttcaggatttaatgtctatcctaatgaagttgaagaagtggttactgcgcacccgaaagttttagaatcagcagctattggtgtaccgagtaaaagctcgggtgagactgtgaaaatctttgttgtcaaaaaagatccctcattgacagaagatgaacttaaaactcattgtcgccgttacttaacgggttataaagtacctaagattattgagtttcgagaagagctgcctaagtcaaatgttggtaaaattttacgcagagaattaagaaatgaagaaaaacagttgaaaacatcaactggatcttgatacaacaaagtataacctttgataaattcgccggtttataccggcgtttttgtctttacgaaaaagtcattagacataaaaacacaagagaaacctgttttgaattatcaatttatcacgacaaacacagcactagaagatgtctgtaaagcagcgtctgaggtatcacaaattgcattagatacagagtttgtccgtatacgcacctattacccacatttggggcttatccaaatgtacgatgggaaacagatctctcttattgatcccctgaccattactgagtggactccttttgttgaattattaactaatcccgcagtccttaaatatttgcatgctggaagtgaagatcttgaagtgttttctcatcaatttggttgtgttccgacacccatgatagacacccaagtcgtggccgcttttctgggctatcccatttcttgtggctttgcgaccttagtagaaaaatatgaacatattgctctcgataaaagtgaatcacgaacagattggctggcacgcccattaaccgaaaaacagtgccaatatgcgagtggtgatgtgttttatttgttacctctagctaagaaattaatcgcacaggcacaagaagccggttatatggacgcgattgttgatgagtgcgaaatgatagccgagcgtcgccaagagaccgtatcaccagagcttgcctatcgcgatattggtaatgcatggcaattacgaggtcaacaattggcatgcttaaaaatgttggcagaatggcgtttaaatcaagctagagcccgtgatatggcattaaattttgttgtaagggaagagcatttatggtcagtagcacgctatttaccgacctctcttgctgaattagatgcgctttctctatcggggcaagaaattcgttgtcatggccgtcgcttgttggattttgttgctaaagccaaacagatcaaagatgaagattgtcctgagcctattggcaatttaattgaacaacctaactataaaaaagcctttaaagcaataaaaacggtgatccaagaggtaagtgaagggcagcgttataaccccgagttattagcctcaagaagacaaataaaccaattgcttaatattcactggaaaattaaaacaggggagcctgaattgctttcacgctggcgtaaagcattattagcagaaaaaattactgcaattttggcgcaatatccttaatatcacgttatattaattcaggctaaagagtaattatttagcctgaaattttctcaaacccaatatgagtttctatcatccttctatcatccaataaatagcaactccaacttattattaatgaatgtttaaaatagcaacaatatatagcgctatttgcacatttgtattcagccagtttatatataattaaaaacacagagccaagcaaatatgtgatagtttatagctggctctgtggatcattagcttatatcagcgaattaaatatgatcacttaggtgattcttcattttcaggtaatgtcacatttaattctagtacggagatatcatcgcctttctgctcaaactgaacagatagcatatcgggatctatctgcacatacttacagataacacctaataaatctcttttcatatcaggtaaataagctggctcagtatcgccacgtcgacgctctgctacgataatttgtaggcgctccttggcaatatttgctgtcgactttttacgcgacagaaaaaaatctaataaagccatcttttaccccccaaaaaggcgttttaggaagccttttttctcttcttcaataaaacggaatggatgttcttcacctaataaacgatttactgtatctaaataagctttacctgcatcagattcactatcaagaataacaggctcaccttggtttgatgaacgtaaaacggattgatcttctggaataacacccagcagtggaatacataaaatttctagcacatcttccatacttaacatatcaccacggcttactcggcctggattatagcgtgttaatagaagatgttctttaataggatcttcgcctcgttcagcgcgacgtgatttagaggctaaaatacctaaaatacggtctgagtcacgtacagaggagacttctgggttggtggtgataatggcttcatctgcaaaatagagtgccataagtgcgccactttcaatccctgcaggtgaatcacaaataataaaatcaaaacccatttcatccagttcatctaacacttgctctacaccatcacgggttaaagcgtctttatctcttgtttgtgaagcagggaggatataaaggttttctgtacgtttatctttaatcagggcttgatttaaagtagcatcaccttgaataacattaacaaagtcataaacgactctacgctcacaacccataattaggtcaagattacgtaacccgatatcaaagtcgataacaaccgttttatgccctttttgagcgaggccggtagaaatggccgcgctggaagttgttttaccaaccccacctttacctgacgtaacaacaataatgcgtgccatggagtgattccttgtcgatgctctaaattaagttctcgattgttaattcattctcttgcaaactaagttggactgatttgccaacaaaatctgtaggaatttggtcgcttagccaatattgaccagcaatggaaactagttctgcagataaatgtgtacaaaaaatatggctctcttggtcgcctgatgctccggcaagaacccgtccacgcaatacaccataaatatgtacattaccgtctgcgattaattcagcgccagcactgacattgcttaacacgactaaatcgctatttggtgcgtaaatacgttgccctgaacgcactggtgtatgaatgattttggttttttgtcgtacatttatcggtacttcattcgttttatcgttatttgcctgagctgctggcttagttattttaccttcatttagaataggtaactgtgcggcaattatcgcttctttttgttgagcgtcatgactaccactaattcccacaacacgtaagccagcatcttctactattcgcctcagttttttaaaatcaatcgtttgatctgcgatagcagagacattgataacaacaggcgcatttttcagaaattgaggcgcttgggcaattttatctgaaatagcctgacgaataaccttcggtgatccatcatttaaatgaagtaccgagagggtaaaattactgccttttaactcaatgggcgtgtttgacatctatctgactcagtaaattttctataatctggcacaaaaaaccagagacgatattacgaaattatataagcatgttatatttactaaaatattcaggcaagtcgcttattttaataattagagtttaatgaaaatgatttgtgcaatttaccgtagtaccaagcgtgatcaaacttatttatacatcgaaaaaaaagatgatttctctcgaattcctgaggaattattacaaagttttggtgaaccacagtttgcaatgttgctagatctcgcgcaaagacagcgtttagcgaatgcagacatagaaaaagtcaaacaagcgttgactgaccaaggtttttatctacaagtgccacctcccgtcgaaagtatgttaaatgcttatttagatgaattaaaaaattcagaaaaaactgaataaatcatcgagataaaaggagcataaatgttcaaatattcgttcatcgcggtgattgtttctactgttttgctatctgcttgtgcagatagccatcagaagagtgcagaaaaaaaacctgtaacaagtgaaattgccaatattgcgacatcggcaccggctcgctggaaacagattgatgttgtctcacttgaacaggcgtttccaaaacagtcacggacacctgcacaatttcctgcttatgtagatgctttaaaacaaaaagcggctgaattgggttataaacctgaaactatcaattttgccttttcggaaattcactttattgacagagtggtgaagtcagaccgtaatcagccagaaaagaaaattactttagatgtgtatttacctcgagtggtgacgaaaggacgtatcgcagaaggggcgaaactttatcaagctaaccaacaaaccctagcgcagatcagcaatcaatatggtgtgcctgcaaattatattgttgccttatggggattagaaagtggttttggtcgagtacaaggaaaagaagatgttatctcagcactggccacattagcttttgaaggtcgccgtgaggccttgtttagtcgccaattaatggccgcacttgagataatcgaaaatggacatttacctgtaggccagcgtttaaaaggctcttgggcaggcgcaatggggcagacacagtttatgccatcttcatttttgacttacgctgctgatggcaatggtgatggcaacattgatatatggaatagccgtgaagatgcgtttgcttcagccgctaattatttagcaaccgagggatggcaacgcgatctcccttggggggaacaagtcagtttacctgctaattttaatcaacagttggaaggtataaaaacagagcaacaaaaaacggtcgcacaatggaaggcgctaggggtgcaattacccgctaatagccaattaagtgatgatatgaaggtatggctgataattcctgatgatgatttgcatagaagttatttagtcacccaaaatttccgtactatcatgcattggaatagctcttacttttttgctttgagtattgtgacgatggctgatggcgttgccaataaaataaatacactgccaactcaacactaaatcacgttagcagtgacataaaacacagcgatttacctaataaggaaaatattatgtatcaacatagagattgggaaggttcgttgcttgattttcctgttaataaagtgatttgtgtgggcagtaattatgcaaaccacataaaagagatgggctcggtgcgctctgaagagccggttatctttattaaaccagaaacggcgatgtgtgatattcgccaacctattgcgatccccaaagagatgggggcagtgcatcatgaaatagagttagcggtattaattggtcagccactgaaacaagccaatgaagatagggttgatcgtgctattgctggttttggtgttggtttagatctcactttacgtgatttacaaagtcaattaaaaaaagcgggacaaccttgggagaaaagtaaagcgtttgatggttcagcgcctttgtcgggatttattccggtgaactcttttggtgatccccaaaatgttgacttaatgttgaaagttaatggtgaaattcgtcagcaaggcaacagtcgtgatatgctaacgcctgttttaccccttatcagttatatgtcgcgcttttttacccttcgcccaggtgatgtcattttaacgggaacacctgaaggtgtcggtcccttagcatcgggtgatatgttggtattaagtgtcaatgaacatcagctgaccacacgggttatttaataatatgatgagcaataaggtaataacgtagagatgacacaggctttttggcagacaaaaactttggatgaaatgagtgatgatgagtgggaatcgttatgtgacgggtgtgggcagtgctgtttacacaagttaatggatgatgatactgatgagatctattttactaacgtcgcttgtaatcagttaaatattaaaacctgccaatgcagtaactatgaagatcgttttcgttatgagcctgattgtatcaaactcacgcgatataatttgccgacgtttgaatggttaccgatgacttgtgcttatcgcttattagcagaagggaagcctttagcggattggcatccccttattgcaggtaataaagcaaaaatgcatcaaggtaatatctcagtaagatatattgctgttcctgaagtggaagttgaagactgggaagatcatattcttaatcgccccaaaggacgcggttaatattgcgctctccctttgtgttacacagagggagagccattattttattgattaaacgtcattaattgatggcgttgattaaagaatttcttataggttaaatagcaagcaataattgttgaaatactggcggttgccatcaacataaaggtgaccataatttggtatttaaccgcttgtagtggatcaacaccggcaaaaattaatccagacatcattccaggtaagcttacaatccccactgtcttggctgcgtcaacggtcggaattaacgacgatttaatactatctcgaataatagccattgaagcaattttaggggttgcccccaaacttaacatttcttggatctgttgttgatgattttcaaaacgttgcccaagctgattataacaaagtccggtcgcaatcattgcattccccgcgatcataccggtaataggaataatttggataggggtaaaggcaatagcatgagtaaaaagtaaaatacttaaggtgagcaatgcccctgtggtaatagcgacaaacgagataataaaaatatctttaacgtatttactgcgttttttagcattataggcagcgttataacagataaataagaccattagaaatgtaaggataatatggtcgacgtcgaaaatataagttaatacgtagccaacaataaagagttgaattatcgctcgggcggtactccaaataatatctttctctaatgaaagtttctcttttcggctaataaatatagccactaagaccagtaacagagaaaaaataagagattcattactgattgtatgttcgttcataataatttatttgctcactgctcaataaagttaaaactaagggggtaatggaagtcaacctaaccttaattgttcatatgactcggtaagtggatcacatcatcggcatgtttgatttcattttgatcgtgagttacccataatgcagcgattttttgctctttgacataatgatggataagctcattgacttttattttattgtcttcatcaagagcactagtaatttcatcaagcaataacactttaggcaaaaactgtaggttacggataagtgagatacgctgtttttcaccaccagaaagttcattaatacctttatttaaaatctcattgggcaaattaaagtaatctaaatctttcgctaatttcttctcatcaacggcgattttgcgtagtaaataaggaaatttaagattgtcataaaccgtttcaccaaataacatcggggtttgagtacaatacgaaacttgttgtcggtattgttcaggagaaagggttaagtagtcttttccgtcaaagaaaagtgtgccacttgtcggtgataataaagaggcaatgatttttaataacgtactttttccacagccagaagggcctgtaatcaatttaaattcagaaggttgtagtgagaaagtcacattatctagaataattttgctatcgagttgaaagccaattttttccagacatagtagtgcgcgattattgttcattctgatcctatacatctagaagagagaagttatcactattatacaaggttaattgtataatgatcctgttccatatcagtgatctgataacaagatttaacttaagtataagagcataaaggtgtgatgataaattgcttttctctatcactactatcagtcaatcaatattaaatagccaataggggaaacagaaagataacgcagcataaaagattaagcatgataaaataggcctaatcatcagctcgtaaaattatcttaatataataagtcaagataggatgaatgttatttattatattgcgcataccattgctgtatatcttgaacgacttttccggttaatcgctcaccttgttgattataaaaaccatgatttaatttatcatatttaataaatgtcacattaggttgcgttatctcttgagataattgatggaatgcagccacatctacattgatatcatctaatgtttgaacaattaataccggagtttgcgtgttgcgcttaatcacctcaagtagatcaatagcaagatattgttgccaccataatttgctatgttcactaacaaattgctcatcaccaatttgattcgttattattgcattagcgagttgttgaaagctatttattgcttcttccacatgctctttaggtgttgtattgcgtatattgtacagtacatcatcaaggaaaaaacgaccaccgccatttaatgcgattgcagcgctaatatcatgacgttcagcaacaactaaatgaaccattgttgcgccttcacttcctccaagtaatacaatattggtgtaattaggggataatttatctagcactgctaaataatcagcaagtctttggttaggattatcatgtagtttatagtttttagggcaatcttctctttcaccattatcgtcggaataagtcaattgtgctgtaataccatacttttcaaccattaaaacatcactactcggtagccatctaccaaaggtttcttgaataaaagtattattttttatgctattacagtcagaaccttgcattaaaactaacagtgttttgttatgttcagcttgtttatctagataataaatcagttcgctattatcttggcgaatcagtttatgtgtgcttatttctgcgtagcttgatgttattgatgatactaagaaagtggtgcagagcaacaaagaacaaatacgcatagaacaaccttattaaccaagggagggtgagagagaaggatggctaaataatccatcaagacggttaattagccatatcaataaactgaaagtcaagtcgttaagtacttattactgattaatgaattggaacgtaataatcaatttccagtgtttttggtagttccataatgtcgctatctgtttctatacaaatgtagttttcaatatctggccctaaacgacgacataaccccaaagccggtaaagtataaaagtagatcttgatggcaaattgtttatattcttctaacgtgcctttaaattggaaacgaacataacgcccgcctgcaatcgctttttttctaaaaccacggggtctggtaaagtgatctaaattgtttaggccaatttcataatcaatctggatcttatctttacgtaatgtatttggctgataagaaattaacacactactttccgtaaagtttttatctgtgtacaacagaaaatcattccaaaactgatgacgaatatcttcatgtagcttgccaatatcctcgatagagcaaaagtattggtattgaataacataaagaaagctttcaggtagctcgataatatttggaatagggaggtcggtaacttcaaaattgatggggggctgaaaattgtcgctacacaacacatcaactttacggtattccgaaggagtaacgccaaaaacagctttaaagcggcgtgtaaaagattgctgcgaatcaaattgatagcgtagtgcgatagttaataccggaagtttagttaagcgcaattcagtggcggctttggtcagtcgtctaccacgaatataagaggctaatgttaagcccgttgcttgcttaaacacccgttgtaaatgccattttgtataacctgattttatcgcaacatcatcaagtaataacggcttttctagatttacctcgatccagagcagaagttctttaatcacttctatattaaacgaagataaagaattggaagggataagtccattgaactgagatgacatgatgatttcctgaaaagatattttgttcagtttacacaaaactgatacccatatattattacatacttatggtatgttttatgggttttttatcatgaaattaaaatcacggcaacaagagaattcagaacaaacacgcttagctttacttgaagctggacaatatctctttgtaaatcaatgctattatgatgtttccattgatgaaatatcacgttatgcaagggttactaaaggggcgttttatcatcactttagtaataaaaaagcccttttgagagagtgttatttactgcaagttaagcatgctgttcaaaaattagatgaagtgcctacttatgatgataaatggcaagagctaacggcgctcttctctctttgtgttgaccatatttatcagtgtaaaaacgagttaattcccttacaagaagttatctcggtattaggttggaaagagtgggaagagattgacgccaacattcttattcctcgtatccaacactgtgttgatatactctttgctgaaaaacagatctgtgcttattcaccggctattgtggtgaatttaatttatggttttattactcatattgctatcaatctaaaaaatgaagcgtcattgccgaaagaggcatgtagtgattttaaagctatttttgctgattttttaatcggggtaaaacaagcatcaccacagcgtcatcaacatagggtataaagaggtattaaaatacctctaagcattgtgcaaaagattaacaatcaacaaataattctgttcaattatcactgtattattgaatagcaaaacatagcgattcaataaagagataagtttaattgaactaactaaaaaataattaaaaatagaataagtaatctttcttaatatcgttaatctatttgagttaaataacctaatgtccacagtattaagcaatagcattattttttaagaaagtaacaacaattctttctgtttaaataaaaaagtatgattagtttaatttataaaataaatactgatattgtatgataaattggtcatgctttaaaatttatcctgttcattctaaaagataattaatcatttaattttttatcaatcaaatcataatgctaatggaatattatgtaacgaattgcttagtggacagtgaaatgaaatgtttatttcaaaaataaaaaatagatttcactatgctctaaagtttttgataaaaatgaccgacattatcaatgtgagcagtctcttacctgtctctataatctaaaaaataatctttaatttattttgttaacactagggaatgcactcttttttactaaagagtgcattctgatatcttacaaatatacagaaaaatcaaagctgtatattttgctggaatatgattatgtttaaaaacatcagtatagaaaaaaccgttaaagttatgctggctattttatttgtacttattatgagcattatttactttagttatgatgcttcaacacgctcttatcataactttgtttcatcaaataacttaagtcagcaaatgttgctgatgggaaaagcgcgttatcaaatggcggtgatcagagcgaatattaatggcttggatgggcagttaagagtgaatgaaaaaccttctgctaaataccttcatcaaactcaagaatatataaaaatcacccgtgaagagatccaccgttgggcggatgctgaaaagttaaccatggaagggcgtcaggttgctgatgatatgacgaaacgctttgatgagcttttagatatatttaccgatgccttagctaaattacgtaaaggacaattgactacgcactctgctagtcaaaaaatggatgaactcaacgagatcaccatgacatattatgccgtcgccaatggtattgagaataattatattgatattgcgaaaacctcacaacagcgcattatgctaatggcgttagtcacagcgattattgtcattatgctctttatcattatcttacgttggttctctcatagctttatcggcaatattaaagtgcttattaatatttttagtaaaatgagccaaggcgatttaagtatgcgagtggaaaatcacggtaacaatgaatttggtaagctatttaatgaaatgaataaaatgaaagtttcattaagtcaaatgattgcttcggtaaaaaatgcagtaaacaccattagcgtcagtgcaagtgaaatagcaacaggtaatactgacctctcctcacgtactgaagagcaggctagtgcgctacaacaaaccgttgcaagcatggagcaaatcaaaaccacggttgaaaaaaatgccgataactcacgccaagctagccagttggcattaagagcgacaacgtcagcacaaaacggcgaaaaggtgatggataatgttatcgaaaccatgtcatcgatttctgaaagtgcgaaaaagatctcagatattaatgacatcattaacagtattgccaatcaaaccaatattctctcattgaatgccgcggttgaagcggctagagcgggtgaacaaggtcgcggatttaccgttgttgcagccgaagtgcgtaacttagctagtcgtagtgcagaggcagccaaagagatcaatgaacttattacccattcggtaaataaagtacaggttggatcacaacaagtgagcgaagcaggacgctccatgtcggaaattgtgaccaccattagtcaagttaatgattttatgcaacagattgccttagcctctaatgaacaaagtatggggattaatcaaattgctatggccgtaagtgagatggataccgtgactcaacaaaatgcggcacttgtggaagagtctgccactattactgccaatatggatgacgaagctcatcagcttgccaacttagtctctcaatttaaagtggatgagaaagaaaatactaggcatgcataaaagggatagtttacgcttgataaaaatgtacctaagaagataaatatgttgttaattcattaaccaagacgaataagataaaacccctttagccactcaaaggtgactaacaggggttttttagagacttaggctttcacttcgttaggtgatgttatacctgcagcaacctctttaatattgtgcaatgtcgtttcactaatactaattaacgcttcttcagttaagaatgcttggtgcccggtaaacaatacgttatggcaagaggaaaggcgacggaacacgtcatcttgaataacatcatttgatttatcttcaaaaaataaatcgcgctcattttcgtagacatccatgcctaatgcgccaattttaccttgttttaaggcattaatggcagctgcagaatcaattaaggccccacggctagtgttgatgatcattacgccatctttcatttgcgaaaaagcactttcatttaataaatgatgattttctgcggttaatgggcaatgcaacgaaataacatgtgaatttgcgtaaagagtcgctaagtcaacatattccgcacccaaatctaatacagcttggtttggataaggatcataggccaatagcttcataccaaagccttttagtatgcgtaaagtcgctagaccaattttccccgtaccgataatccctgcagtgcgattatgcatattaaagccagttaagccttctaaggaaaagtttgcatcacgggtacgctggtaggctctgtgaatacgacgatttaacgagagcatcatcccaacagtatgctcagcaatcgcttctggggaataagccggcacacgcactacggtgatccctaattcggctgctgccttaaggtcaacattattaaaccccgcacaacgcagtgcaaggatacggatgttgagactggcaagctcttgtaataccgcacgattagcatcatcattaacaaagatacagactgcatctgcgccgacggcattttttgctgtttgttcagtcaaattaaagtcaaaatattcgatatcataatgatatccattatgctgattgacccattccatgtgtttgcggtcataatgtttagtactataggaaacaattttcatcctgtactcgcttattatcgattaaaatttattttgagagtgagaaaacaagaattatctaaccccaatagagaaacatttaatactattattataaacaatttaatgggtaaagtggatgttcggaatgtggttaatgtgatcaaaaggaaaatgaggtgttgttaaagaaaacaatcaaatggacagggatgatactactgggtgtcggcgcagttagcacgaccttgtggctcaccattccacgttggttacctgttgtggctaaaacctatttacctgaaggtgtttcactctctttaacacaacctaggttacaacaatggggtgtttttattgatgatatcgcattaaaaagtgatagctgtaccttggctaatgtgcagcaatttacgtttaactatcaaaaacagcaaattgatagcctatcatttaatagtcaacaacttactattaacgaagggtgtttttcacaattatcttttgcagataaaaaagagaccgcagcagttcctctcgatattcatgcgttattagctactattcctcgcttatcggttgatattaatcatgtttctttaatggataatcagcgctataacggccattttcagcttaaaagtgatacaaatgggcgattaatcagctatcagggagataatacgcagatacaagcgctgatccgtgataatcaatggttagatattaaacaattaaagattaatttacctgacgataatcagatagagctggcggctgaaatcgcgttaccccttaatgttgattcattaccagaaaatggttctatcagcacaacattgttaacatcccattatgcttacccattagtctttattgctcaatggcaggggaatagcggtactatttctattgctgaacaaggcggagggcaagcgttagctgtgttgccttggaatgtaactgcagaaaatatcacgatagaaaaagggcgttgggaatggtttgggcttgatcaacccttacgtggtggtgtgaatatcaacattgcccagtggcagcaaggattaacggggttacgcttaactgcgcgcttaaatgttatgacgcaagggcatgcagggaaagggaatttagtgatgacgatacctgaaacggcgattaactggttagatgctgatatacctattcaattgacaggcattgtaaataaagatctcatgcaagccagtgcacaacttcccgttaaagtgactggtatgttgacagatcctactatcgaatttcagcccggttcactattacgctttaaagggcaactaacagaaacgctgacggtaaaagatgctcgtttaccactggctggctcaacattatcttccaaaggatttaatggtcacctaaatgcgattgtgttagctgaagatactatttggggagattatcgggtccattttgctggacgttcgaccgatttcttacctgatcagggcaattggcaatggcgttattggggagagggcaatttattgccattaaaagcgcgttgggatatcgctggaactggctcttgggtagataacatggtgagttttgagacattaaataccggatttgatgttttaacttatcagcataccagtatgttagcccccagattgacgctcttaacgccatttcgttggttaagagacgataaaaacccattatttgaaggaaaattgaagttaaccagtcaacgaatcgattttcctgcggggggattcttagatagagctgactttattgccagtgtaaaaggtcaatctccttttcgttttaatatgaaaggcgagctcaatgccaagccaaatattggaccgataacgattaatacacgttgggatggtgaaaggctaagagggcagatgcgttggcctgcacaaccaatcaatgcctttcaatctttattgccagaaaaattaggcatcacattagataatggcgaattttatactcaagctgacttttctattgcccctcaacaaggtttagttgctggtggacatttagtagttaaacaaggcagcatgtggctaaaagatggcgtattagaaggactcgattttattttaccttggcgtttaaacggtgatgaatggcaactaggtgtaaagcagccagtgcaattacgcattaagcgcgtcaacaacttatttgaaatgacagatattaccgccgatctgcaaggattttaccctattacagaagcaaaacctttagttttatctaatgtcaaggttgccatgcttgatggcactatttctatggcaaaattagcattaccacagcatgaagcggcgattatctcattagataatctagagttaagtcggcttttcactttattgaaggtgacccaatttgccgcatcaggtaaagtaagtggcgaattacctttctttatcaataacaatcagtggatagtgaaagatgggtggctggctaattcatcgtacttaaccctcaggcttgataaagattttgttgactctattgatgatagcaatatgacagccggtgtcgctatggcatggttacgatatttagagattagccgctcttggacgcgggttaatttaagcaacctaggtgaattagtgcttgaagcggaaatccaagggaaaaatccattggaagacaaacggcgacaagtaaatcttaattatcgccatcaagaaaatatttttcagttatggcgcagcttgcgatttggttcgcaattggaagagtggttagaaaagagcctatccgatttagggagtgagtcagaatgatgttattatttttaaaaagactatttttatttgttattttcactatcggcatatcagcactcactggatgtattcgattagaggttgctaccccggaaaaaccgataaacattaatatgaacgttaagattgaacatgaaattaatgtcaaaatagatcgccaagttgaagacttgctgaaaaacaatagtgctatattctaacgctggggtgaataatgaattataaaaaatatctctttagttttgcattaatcacagcattgattagttcaaatgccgttgctttaacacttgatgaggcgcgcgcgcaaggcttagtaggggaaacttttagtggttatgttgagttagtgcaaccaaaccataagcaagctcaaatattggtgaatgaaatcaatcaagccagaaaagccaaatatgctgaaattgctaaaaccaatcaagtgactcctgaatctgttgcccgtttagcgggtgaaaaattagtggcaagagccaattcaggtgagtttgttaaaggaattaatgggcagtggattaagaaataatatccactacccaagtagcgataaaagagagactaaattattctcatagcgttgatatagtgataatacttattatcactacagtactctgttttctacacccgcaaattcattatcattttcaacaatctgatcttttgcttccacaatgaacgtaatacgagaagatatataccctggctttgcgcgaagattatcttttttgacataatttataaagaaattaaaataagcagtaccactttcatcaatagttttagtgaatgtatttttctgatttaaatcaataggattattttcatcatcaattaattggaatgtcacattatcacttgcttcagagcctgttacatcgttgataaggtaaccattattaaaatcaatatttgtattatcaatacgtaaagttattttagtattcttttctgaacaaagactaaaaactatagcaattcttttagaatatctgtcattagctaaggttcctgcataattgctagggaaagaatcaggacgtatacttctaactttagtgctattaggtatgtcaaagctacaacttattggcgctggtaaactacctcttctattatcagataaagcaataaaagggaagtatagtaatagtagaggaattaaaaatgttatatttattgatttcatagaaacaccttacataaatattcaagaataaaaattattcattattggcaataaatttgtttcttaataattgaattatttttactttcattttttacgttataatggaagaaacattgttgctcctctgtatctccccattttacttgtaccgttccgctttcttttattccggagaggaatattctattgtggtcatagacagaatcactagaaatgagattattattatcatcaaatgccattacattggcagcaaaaggaattggtgtatttgaggtaaataaaacattatagcccctatttatagggaaattgatttttgctaccgcacctaaagtaggtacgatgattttactttgagttttagtattactaaactcaggtaacgaatttatgtttagtccaatagtatttttacgatatggcatgatgtgcggtaatattaaattaccgttattgtctgtaatggcttgtgaagaacgattagttttaattccggcaatgccattcgtatttacaatagcaaaagtattacctaagtcaggtgccaaagttactccactttgatgtaacactattgcaccattaatccctaatcttaaattggttttattattagacgatttagttgtattaatagaataagattgatatctccccttatactgagtatttactgaagtatgatagccagcatttgggtggctaaaatcccgtcggtaattaatagaatagcctaagcgataatgttctaataaacttccacctatagtcgtactatttatataacctttattgtttggatgataatcaaattgattgcttacccaatgataggattgagagctatttgttagtggaatattaaaatttaaagaaaaatgattgtcattataatatttttcatttttatattgatattttatactataattcattttttttatagaagatgatagagaagtattgattgtaaagtcattttttcttttggcataagaattttgatgataaccaatagaaaatgtcccgaaagatttaatcggttgaaagagagaaattgtatagctattttttatgttgtctgtttgactttttctaatgctaacactatcagattttattgattgataatggctagaagatatatttaaagaagtaccaatattgctccatcgtttattatagcgcaactggtattttaatagattattgtgttcaaaataactaatatcactggctactcccccccagcgtcctaaatctaatgataatcctgaaaagaaagtattgctattcagcttctttctaattgcaccataagcggttattttttgattaataccataggagaactcacccagtaaaaaaatagggttattattttgattattaaactggttatatctatcataagaatatccagaaataaaattatattgataacgacctttttttaattggtttggcattgtagtaaagtaatgagtacttttttttatacgtccatctgcttcttttatttctaataccaattcattgctacctataacaggtagatcgtttaaaataaaaggcccaggaggaacaatagtttcataaatggttcttccttgttgtttcactttaatttcagcatgagattctgcaatctcttctatgataggactattcatatagagatcattaccagagagcaaattactagatataagttgaaatccaattaatttatctgttgataacattctactggttggtcgaaattcccccacattaagcgttgccaacagcgtatttaattgatgataagcatataatgagtatagcttaaattgctgttgcttatgcgtatgatgataataacttttactacgtactcgccaagcacctaagttagcacctgagttaaaactgattttgtgttctatcttattttgattgttatatttgccaaaataagaatatgagctaaacaaagcagggacaccatcatcccataaaacttggctagcaagcatattttttttattatctaaggctttttgtggaatagttaaatataatgattgcgaggagaaattatatttaaaatcaatattgtaatcgcttaataacaaatcagaacttaaatcaataggaatattataaaaagatggatcaatatttaaacgaattaaatcattaacattaatccttggtgttaatataccgtctttattttcataatataaaataatggtttcttttttattttcgttgatataaatatttgttgagtaataaccatcaggatgttcattatttaataacttgccgatggttttattatcaatatttgacaatacacttttatatagagaatgaatattattgttagcaatagaaaagaaagggtatgcatttaatatcaatagcaaagatgtttttagtctaaaacttatcttactcataaataagttcctttggggttgcaatgatagtctgctcatactcatcgactctcttccaatgtacttttttatctttaatatttttagttatttttttattttttatactgtaatttttaaatggcgatagggttattcgctcatttaatatatcaatgttatctacctttgcttctgctatggtaataaaataaggagtggggttgtttattttaataaaattttcatcattaataaaaaaattaatatctttattatcacttttgttaataatattgctaggtgtatagaaaagattatatattgagtttaaagagataaggagcaggtttttatcagccatctcatcatctataactggaactaattttatatttactctatatacagattcttggttgatttcttttatatcatccgttttgataatttttaatgtaaaattttcattgggtgctaatcttattaaactaggagaaatgataaatggtgcctcactattatcttctttgttatagtgtgatacccaactttgaataatataggttttttgttcgcttttatttcttatgtcaaatagaatttccttatcttgttctttataaaaaaatctatccttattaatttgaatagaagcataacatgagaatgtaaagacaaatgatattatataaacaatatattttttaatcatatgttttttaattaaccattagttaagttatttattatattaatccataaataaaaagccggtatttccccggctttatattgggttaaaaattaaagcagaattatatttaattttggccttttttattggatatcatcagtgacgtaagcatcaagagataaggctgcattgaaagcacctgcggtaacagcatcatcaatcgattctggtctatcatattttaataaaaattctaagctaccacgttcaccggcaacctccgaagaaaatgtacgttgttctcgctcaccattaagtggaacaagttcacctgtagaacgcaataatgctactcgagcattggtatcattttctgtcgaacctgtattcattaaatgagtagcgttttgttgtccaacaactactttgacttttctatctcttgcttgattagtacagccagaaaaatccacactaaatcgtttttcaggagtaagtagtaaagaatcaacgtaagcatcatccaattgaattggagcaatatcttgaacgacacaagttagtttctcgtcaattactctgccttggatatctatattataaccaccaaggtgaatctgttgtgcaatagcttgtgttgataaagaaagtgtagatagaattaatagtgaaaataatgattttttcattttaaagtccatttaagtattaattgtagttacaaatttgctcataattaagagcgagataataatatttttttacgtgaaatttgacaagttatatataattatgattagtattattttgttaaatgattagcgaaatatgtttttttgggttggtttgttagatttaaattttaaattataggtaaaagatgaaggatttatctattgagggttttttttaaaaaaaacagaggttttatttgtgtaattatatttataaataaatagcaccttgattaaaggtgccattagatatatttttattttatcattatttctttattgataattaaatttatttatttttgtgcttgaacatgtgactgttgtgcatattcttcgcctagcgcagtatcctcggtgagaataaactgtacattattaataccaataaatgataaaaattgtgttagatatggaataattaaatcagagggttgtcctttatggatcccaccacgactcgttaatacaataacttgcttatcttcaagtaatccgactgaccctgtttcagtatatttaaaagtttcgcctgcacgcgcaataaaatcaatagaatgttttaactgagagaagatggagaaattatatatagccgtatctttgccaaaatcaaataatatggcttgatctaaaacgggaatgggatcttttgccagatcacgtagggtaatgaggtcattttgatggtgtttttgccaaattttaatcttatgttttttaattaatcattagttaagttatttattgtattaacctataaataaaaagccggtatttccccgactttttattgggttgaaaattaaagcagaattatatttagttttggctgtttttattggatattatcagtgatgtaagcatcaagagataaggtagccttgaaagcacctgcggtaacagcatcaatcgattcaggtctatcatattttaatgaaaatactaatctaccactatcaccggcaacatccgaataaaatgtacgttgttctcgctcaccattaagtggaacaagttcacctgtagaacccaataatgctactcgagcattggtatcatttgctgtcgaactagtattcattaaatgagtagtgttttgtcgtgcaacaactattttgacttttcttgctctttcttgattagtacagccagaaaaatccacactaaattgtttttcaggagtaagcagtaaagaatcaacgtaagcatcatccaattgaattggagcaacatcttgaacgacacaagttagtttctcgtcaattactctgccttggatatctatattataaccaccaaggtgaatctgttgtgcaatagcttgtgttgataaagcaagtgtagatagaattaatagtgaaaataatgattttttcattttaaagtccatttaagtattaattgtagttacaaatttgctcataattaagagcgagataataatatttatttacgtgaagcttgacaacttatatgtaattacaataaatatttatttattaaataattaggagtagatactttatatggtgggtaagctagatttaaatatcaaagtatgggtaaatagtgaagtatttatctgttgagttttttttaaaaaaaaacagaggttttttttgtgtaattatatttataaataaatagcaccttagttaaaggtgccattagatatatttttattttatcattatttctttattaattattaaatctatttctttttgtgcttgagcatgtgactgctgggcatattcttcgcctagcgcagtaccctcggtgagaataaactgtacattattaataccaataaatgataaaaattgtgttagatatggaataattaaatcagagggttgtcctttatggatcccaccacgactcgttaatacaataacttgcttatctgcaagtaatccgactgaccctgtttcagtatatttaaaagtttcgcctgcacgcgcaataaaatcgatatagtgttttaattgagaagggatggagaaattatacataggcgccgtgatcacaataatatcatgtgcttttaattcattaattaatgtatcagagagtgctctagcggctttttgttgttccgataacatagccgtatctttgccaaaagcaaataatgtggcttgatctaaaacaggaatgggatcttttgccagatcacgtagggtaatgagatcattttgatgatgcttttgccaattttctattagatagtcagccattttattgctgtgcgagtaattttctaaaatactggattttagtacaagaagcttgttcattttattctctcggtaaatatctgttatgtttatatagaccaaattttatcttatctgaaaaatttcacaccataatcgtttgaatatgctattcaaatttattgattatatatattcatagaataagaaaattcatcaaccctttatgtgcaaattggctgttgtgatatcatggcaacaatattatttggttaaataaacctcaaaaaggataacaaaaggtggcactatcatctgcgatgctctacaaagagatagagcaactctcgttgcgggatcagcaacgattgagaaaacgcttacgtggcgttgataaaataagtaaagaaacgtcgaaacacgcggtattaagcgagattgagcaggatattattgttgcaaaacagcgtatattaaatcgacaagctcactgtcctaaaattgtttatccagaaaacttgcctgttagccagaaaaaagaggctatctacaatgcaatcaaagataaccaagtggttattattgcaggggaaacgggatcgggtaaaacaactcagatcccgaaaatttgtctcgaattagggcgaggcgtaaaaggttatattgggcatacgcagcctcgacgtttagctgcacgctctgtcgcagagcgaattgctcatgaattaaacacaacattaggtgagtctgtcggttataaagttcgttttagtgatcatgttggtgataacacgctagttaagttaatgactgacgggattttattagctgaactacaacaagataagctgttattacaatatgatactattattatcgatgaagcccatgaacgtagcttaaatattgactttattcttggttatttaaagcagcttttacccaaacgcccagatttaaaagtgattattacttctgccactatcgatcctgagcgtttctctaagcattttaatcaagctcctattattgaggtatctggccgaacttatccggtcgaagtgcgctatcgtcctattggtggtgatgctttggatagtgataaggatatgactgagggcattattgatgcaattgacgagttaagtcgagaaagtgcgggtgatattcttatttttatgagcggtgagcgcgagataagggataccgcagaggcattaaataaattacaactacgtcataccgaagttttaccactatttgctcgtctttctaatagtgaacaaaaccggatatttcagcctcataccggaagacgcatcatattggcaaccaatgttgccgaaacctctcttacggtaccgggcattaaatatgtgattgatacgggttatgcacgtattagtcgatatagttatcgaaccaaagttcagcgcttacccatagagcctatctctcaagcttctgcggatcagagaaaagggcgttgcggtcgtgtttctgatggtatttgtattcgtctttattctgaagatgattttatttcccgtgcgcaatttaccgatcctgaaatactaagaaccaatcttgcttcggttattttacaaatgacctcgataggattaggggatattagcggatttccttttgtacaagcgcccgataaacgcaatatacaagatggtgtacgcttattagaagagctgggtgccttacaagagggtactgataataaaggtgcttatcgtttgacgccgatggggaaacaattagctcagcttcctatcgatccaagattagcgagaatggttcttgaagcacgcaaatatggtgcagttagagaattaatggtgatcacatcggcgctttctattcaagatcctcgtgaaagaccgatggacaagcaacaagcatcagatgaaaaacatcgtcgtttccaagataaagattcagattttctttcattactcaatttatgggactatttaaaaactcagcagaaagagttgagtcactctcagtttcggaaacactgtcgccaagagtttttaaactttatgcgagttagggaatggcaagatgtctatacgcaactacgccaagttgtgaaggaattaggttttccaattaatagccaaccggccgattttaaaagtattcatgtggctttattaagtgggctattatcacatatcggacaaaaagatagcgataagcaagagtttactggcgcgagaaatgcgcgttttgctatttatcccggctctgggttatttaaaaaaccgccaaaatggaccatggtggcagaattagtcgaaacatcacggttatgggggcgcattgctgcacgcattgaagcggaatggattgaacctatcgcgacccacttagttaaatatcactatagtgagcctcattggtcaaaagcacagggtgcggtaatggctaatgaaaaagtcaccttatatggtttacctattgtggcctcacgattagtaaattatggcaaaattgatccactattatgtcgagagttatttattcgccatgcgttggtagagggcgattggcaaactcggcatgcttttttccgtgaaaatttaaaattacgtaccgaggttgaagagctagagcataaatcacgtcgtcgcgatattttagtagatgatgaaacgctgtttacattctacgatcaacgaataccacaagatgttatctctacccgccattttgataaatggtggaaaatagcgcaaaagaattcacctgatttgctgagctttgaaaaaagcatgcttatcaaagaagatgctaaacgtgttagtgcattagattatccaaattattggcatcaagataatttaaaattacgcttaacttatcagtttgagccaggtacagcagcagatggcgtcactgtccatattccattaccgattttaaatcaggttaaagatgaaggttttgattggcaaattccgggtattcgtcatgaattagtcgttgccttaataaaatcattacctaaacctatacgtcgtaattttgttcctgcgcctaactacgcttcagcttttttagaacgagtggttacccctgaaggtgaattactcgataaattaggaaaagagctacgtagaatgaccggcgttacggtcgaacgtgatagttggcaacttgagcaagtggccgatcacttaaaaatgacttttcgagttgttggtgacaacaataaaacccttgcggaaggaaaagatcttaatcagttaaaagcacgtttaaaggacaaagttcaagaaacattatcagcggtagcagatgatggtattgagcagcaagatttacatatttggagttttggtgacttgccacaacgctacgaacaaaagcgtggtagctattcagttaaagcctatccggcattagtggatgaaaagaatagtgttggtatcaagctatttgaaacagaaacagagcaacaagcggcaatgtggcaggggataagacggttattactacttaatattccttcacccattaaatacttgcatgaaaaattgcctaataaagcaaaattaggtctttattttaatccttatggcaaggtgctagatctgattgatgactgtatcgcttgtggggttgataaactcattgcttcttatgggggattaatatggcaagaagagcaataccaaaaattccaagattatgtccgtgctgaattaaacgatgttgttgtcgaaattgctaaacaagttgagtctattttaactcaagtatttgcgattaataaacgcttaaaagggcgggttgatattagtgtcgcttttgcattatctgatattaaagcacaacttaatcaattagttttccccggatttgtcacatcccatggctggaaacgtcttgcggatattcctcgctatctcagtgccattgaaaaacgtatggagaaattagcgattgatcctaaccgtgatagagcacaaatgagccgagttgaaaatgtcattttgcagtggcaacagtggttagctaagttaaccgagaagcaaaaacaacaagaagaggtacaaaatattcgttggatgatagaggaattaagagtgagtttatttgctcaacagataggaacgccttatcccatctctgataaacgcatcttacaagctattgagtctatctcattaagttaaagctgatagataaacccacaatggtgagttatggccattgtgggtttatatactactattattgataatgtactgaaatggtaaattgatcattaatattgtcagctaaaaccactttattactgtctaagataaaagatgttattgcgctattttttattgaaatggcagtgttctttttaatattcaatattctattagcgttttttattattgatggacaatttgatatcttcaatataacttcttggttctcttttgatttattatcatccattatgtattcacagctagtttcatagatataataagcatttacagaaaacacaggtagtaatattaataacatgataataggagttaaatgttttttcataggggaaataaattatttatattctaagtttacattaatttgtgatgttaccttgccaggcaagatgttttcactcattttcacataacctactgaaaaaggaaaagtatattccgtcgaaggtgttctatgaacgctattataaataacattacctaaataatatttattatcattatatttaattgataaacctaccccagaaggggtgccattattaagaagtgttaataaattagtatttctacttttataaatagcaggtgcatcaagctttaatgaaactaatgtatcttggttacaaataacaccaatagaaaaatgtgtttcattagcgggtattgaatcacttaaactgtttttttctacaggcgctaattcaatattaggttgttcaatattaagttcgcaaactttattctgaggcttctcaataatcaaattattataagtaaattttttattatctaatgtataaacaagaaaatcatccataacaaatatgtcgctcagaggttctagaacgatttcgcttatttttattaattgaatatatagtcttggccaactatcagtacaatatatatttttatatccttcttttctagtttgagcattacagacatttgcatattcaggtgttacattaaattcatcgcctactaagttaaaaggtgttttattcgctgatatcttaaagccaactcctggaatatttgttttaaaaatatcatctttataatgccttgcattaataattaattttagatcaactttatctttacaatgaagaattgacgtagatagagcggcatcagtaaaactcatttctgcgataggttggccaatatcgacacctaaatcaatatcactagctttaaatctaatattatgtactggaataaacccattgtctgttatatcgtcataaacgcaattgttactaaagcttttatatggttcatcagaataacaatggaatgagagtaaataaattaaaataataatgtatttcatttttatatattattcctctttaatgcaatttacagttttaaaataaattctattttgtttttcattatcatttaattgatagttaaatgagcactgttgtttgttggaacttccccattttacaaaaatctttcctgaaataggtaaattagaaatatataatttattatcttcatttacataggatatatcggatagggtgccatcagaatttttcacataggctgttgcaccaaaaggaatgttttggtgaaatgtaaataaagcactttctcctttagttaccttaatattttttgcaataatagctcctttagtaggaattaaatgatagctataattatcaatattataattataatctaatgattttgcatcaatgtggaacttattgttatgataactagttaaattaggaatgattaaataacctcttcggtctgattctattgttggctttcctattatttttactttcttagcacctgcaaaatttaggatagcaaaactatcatttagatcttgggctaacgttattcctccattatgaaacacaatgccgccattgagtccatagcctaaagaataactatctttattaaatcgagagtttatatttagtttggctatcctacttaaataattaattttcattgatgaatctaagcgttctttattatttttagaaaaatcaaggttataatttaaccgattattttctaatgtatttccactaaatgaaatattctcatgaaaatatttttctctattatcataattgatccttgctgttgcccaatgagagagatcttgaccaatagggtaatttaaaaaaattgataattgattattattgctatactgatctttgctattctctagctctaatgaataggaaagttttttataatttgaactagtattaataaaaagtcgttggcttttttcttttgagtgataataggttgcaatattataccccaacgttaaagcaatattattatttaatgattgtgaaaagtgaaatcctaaatcatatttcttatattctttatttacagcataattctctttaaatctaaagtagaatgatgagtttaatgaaatagttgtattttccatagaaaatactttttggtaattaatcttattggactgatattgttgatgatatttctctcttatccaagcgttttctaatgagactatacccaggatatttaatcctagggtatttccaataagtgctttaatatcatctccttttttttcagctcctatcattgtcgttaaataattgctcactccatagcttaaattcaattgagttaatagttcttttttcttattagaaggaaactgtcttttttgaggattgtttactaaacccatagtatagtaataattccattggttctttcttaataaatactgtgaagaataattccagattttcttctttcttacttcgccattttcttcttttataattaatactaattcaccatttgtacctaaagagggaaggttattaagagtaaatggcccaggtggtacagatgtgctatatagtgtttctccattttgctcaatgctaacttctgcataggtataggcggtttcacttataatgggtgcataacctactagggagccatctttcattgcattatcgctattgatttgcacgcctagtattttataagtgtttaagttaggagaataagcatagaaatcacccatagttaaaatggaattaatatttctaagtgtcctatatacatattgctggtttatagaaaaagaattattattattatagtttagatcttgacgataacgccatgcaaataaattaattccattatatagctgtaggttatgtatgtgttgtccatttaaactattttgtttataataatggccttgatagttgtatttaatgaaagcagcattatcaccatcatccaatttttctttggaatatgaagtgtttttttctatcgcaattaatggtactttaaagtaaatcgactgtttgttaatttctaattttatattaaataatttttttaataaatcatagtcaacgatatcgttgtctaacttattttttaaaggctcgtaataattggtgtttattccccattgttttaaatcaaatagagttattattggagttaagttattgtttttgtttttaaatgatatctcagaattttgttttttattgttatttatataaattgttatgttataggttccttcgagaaaattttcattaagcaagagtgaaaaatcaatatttccattgtggttttcaattgcttgtaagtaaagtgcatttgcatatacatagggcgtaaataataagagtaaagaaataggagataactttatcataattaatactattcgctattttttatgttgatattaacttcattaccaaaatcatttatatagctccagcctactttagctgtaccaaaatgattttttcctatattaatttcactaaaaggggatagcatgactgagatctcttttttttccccattagaaaaaatatttataatagtgaagtagtattcagagttgttttttattatcatttcttttttattatttatagaaaaaataattttttttgtcgcttcttcaactgtttctgttaagccatgtggtcggtaaaataatttaaacactgacttaattgatatatgaatactattatgttttgattcagctatagggatcgctttgctatttatataaaaaagactttcacgatctgtttgagctattgatgtgattttggcaattcgcaaaattgcagattgttctttatttaatttaaataaaggtggggtaatcataaaaggtgtatttttatcattttcatcctttgtgatccagctttgtattaaataatcagtagcggagtttttattttttatattaataataatatcattatcgtcttcattatagataaaccgtgttccactataaattacatttgcttgtgtaaaaaaagtagaacacagaattatgataaataaaatataaacattatacttcataataaaataatcctgtgttttttttaattaagaatatttaacggtaaaatttactgatgtattgacagttcctgatgttggatttggaagataactcgcgtaattggcatggaatttataagttgctgttttattttcaattctcttagttattgcttggttaccatttaaatgaataatatttttattaccttcatcactacgaatgaaaattcctactcctttagcgctattatttgtgatgcttttattcttcataattttattttcaccggctaaatcagtgccgttaaatgttaatgttgcattattattgccacaatctaatagtttaatttcaaaattactacctgtactgcttttggcattggcccaatctttatctaagactatttccgatttattaattgtaggcaaagtgataggagaactagggctatctatattgcaggatgttgatattactgttccactaaaattaataatattgttatttttcttttctgttgttttgctattatctgctaatacattcatgctagaagagataactaataatgcagatagtaatctgatatgattttttattttcatcgtttttcctttaataaataatttgataacgcaataggtttatcctatttgttgcgacggagtggataatatagttttctaacaaaaagtaaataaagtgtatttatctgctttttgttggaaaatcagtttatctgtctgtatattatactatacatggaggcattaactaaaaataatatattttattgtgttattcactggttttttaaaaaacatcatataaaaaatgaattttatataaaaattatatgggtaaattgtagtcaattagggaaataattagttacaacatacaatttatccctctaatataatgcacctaaccatcatcaataatatttatttgctaagtaaccaaaacatggcgttattcaatttctaatgacaaagcttaaggaaatgaacaagagaagcttgggtagaaaaaaagggagtgaagggaaagagatgcccccttgcttctttctcaagggggaatatagatcttaattaaatactaaatagccacaagcaggaattgcgccaattaataccatcatcagtagtattttttcactagtatttaatgactgtttatctttatattgttttcgtgaatataaaaatattaatacaccgggtgcatagagaacgacggaaagtaataaattaattacacctgatgcataaagtaaccataaaccatagaggcttgcaggtattgctatcagtaataatcctcggctactgcgttctatggcaactttaaataagaaagcaccaaccaggaaataaggaacgaggatcatttctgacgcgatggtcagtagggtattgtaattactaccagtaagccaaattaatactagtgataattgaacagctaaattagtaaaccacaaggaagaggaaggcgcatcattgtgattttgtttactcagttgtttgggaaaagagtggtgtaatgcggcaatataagggacttcagcagccataattgtccagcttaaataagcgccacataccgatagaataaggccggcggcaataactatctcacctatatttccaattagttgaaccagcaaaggtgccatagatgggtttttcatcatagcaagctctgattggctaactaatccttgagataatagggtaacgagaatataaataatcagcgcgatcacaaccgcaaatattgtcgctaaaccaacatctcttctattttttgctcttgcagatacgacaacggccccttcaataccaataaatacccataaagtaattaacatggtattttttacttgttcccaaacgggcacgcccatttttatcccttcgaaatcaaaggtaaaaatatccatattaaaggcaagtagggcaacaataataaataaccccaatggtattaattttgccatcgtggccattaaattgatactagcggctgtttgtacacctcgtagaactaaaaagtgcacaacccaaagtaagattgattcacccaacaatgcctgccatgtattaccatcaccaaaaataatattattagggctgtcggtaaaaaaactcacagcagcgaaaacgatgactaaataagagacattggcaactaccgcacagacccaatagccccaagcagaacaaaagccaataaattcaccaaatccttctttcgcataggtaaaaataccgccatcaagatcaggtcttaagcgagaaagcaataacaatgatagggcgagaaaaaggatgccaacccctgttattatccaaccgataatcagtgccgcagggcttgcaacctcagccatattctgaggcaaactgaatacacctgcaccaaccattgagcttagcactaacgctgttagtgacattaaaccaagttttttattcaaagataagttcctgcatgattaaaattgtgaataaatagcgtattttcttgtttttggtttaataattagcataaatatgaatctgttaatttaagacaaagataaaaccactaaaaaacagcgagattttacggagagttgacttggttgtctatgcataaaatcataaattttatgcataaggataagaaattgagtgaggttatttggacaagtataaaaaaaccttgcatagagcaaggtttttaaaagagaaagtaacaacagattatttaaataaatcagcggtgattgttaccgtaccaccattactctgccattcacgagtaatatggtagtattttgcacctttctctgcggcacgtttagcaacttgataagaaacttccggtgagttcacaaaataaccactgaaagtaatggtatcaaaaggttccattaatgcagccgctgctttattaacctcttgaatttcagtgccatcaggtaaggtgacagtgtaacgtccgcttttacctgatgattgtgtttcagcaaatacacctacatttctatcaaagtcactatttgacgcaagtcctggtttttcaactttattggctgcacttccaccttcggcaataagcgctcgacccgcatcagagtcataaggaaccacggcttctgaagactgtatggctcttttaggggcatcttttttatagatataagcagtaacttcttggttaccaccatcatttaccgaaatattacggacaataaagaatgatgctgcacctttttttgctgcttctttcccgatttcgttattaatatcaggtgttgttggatagtaaccatgaatagtaacggtatcaaaaggctgtagcaaaatagcttcaggttttggtaattcttttacaccatgaaatacgcggtattcttcttcagttgcttttggtgcatcttttcgatacagatcggcagtcacactcatgttgccactatcactgatatcatctagaccttgaatgtaaaaactatcagcaccgattttatcagcacgacgagatactgcgtcagctgcttcataaatcgcattaaaacgaccgatgactgtaattctttcaaatggttttagctctgccgcttgttctggagacagttcctgtgcagcctgcgcaacagtaatattagttaaagataacaccgctgctgcgatgactgaggttttcagcttcatacaaaatccttccgccttgcgcaattaatattggtcatgtgctgaacatagtgatctatcacatagagtgcaattattacatgtaataatagcgtttgtcgcattattttatttagtgaatagccactgggtcaaatgaccagtatatgttaccagatatttacttaaatatagtgaataattcattaatatgccttttcgactaaaatgatcgcattaagttcaattttagctttacacagatctagattattggttttattttcagtaggttattagtaccccaataaatggcatgtgaatgataatgcttaacaatttttttgcatattaatgaaattagccatgaaatattaacagttttcggatggataagaagggaaaattatgcgaattggtatacccaaagagcgactttctaacgaaacaagagttgcagcaacacctgctacagtcacacaactcttgaaattaggatttacagtcgcgatagaaaatgaagctggcattgcttctagtttcgataatgacgcttatcaacaagcaggggctgagatcttagattgtcaaaatatttggcaatccgacattatcttaaaagttaatgcccccctagaagatgaaattgctttactaaaaaaaggctcgactttaattagttttatctggcccgcacaaaatgcaccattgctagaaaaattagctgaaaaagagattaatgtaatggctatggatagtgtaccacgtatctcccgtgcacaatctttagatgcattaagttcaatggcgaacattgccggctatcgtgcggtagttgaagccgctcatgaatttggccgtttctttactgggcaaattaccgctgcaggtaaagtaccaccagccaaagtgatggtgattggtgcgggtgtcgctgggcttgccgctattggggccgcaggtagtttaggcgctgttgttcgtgcatttgacactcgacctgaagtcaaagagcaagtgcaaagtatgggcgctgagttcctagagctggattttaaagaagaagcggggagtggtgatggctatgctaaagtgatgtcaaaagcatttattgatgcagaaatggcattatttgcagagcaagccaaagatgttgatatcattattaccacagcattaattccaggaaaacctgcaccacgtttaatcactaaagagatggttgattcaatgaaaccaggtagcgtggtggtcgatttggcagcccaaaatggtggtaactgtgaatataccgttcctggtgagatttttaccactgaacatggtgtgaaaattattggttataccgatttagccgcccggttaccggctcaatcatctcaactttatggtactaacttagttaacctattgaaattactctgtaaagaaaaagatggtaatatcaatattgattttgacgatgtggttattcgtggtgttaccgttattaaagcaggggaagtgacatggccggcgcctcctattcaagtttcagcgcaacctaaagcagctcctgcagcaaaaccccaagaaaaacccgttgcgaaacctatttccccgtggaaaaaatatggtttattggctattgcctttttactgttcgcatggttggctaatgttgcgccaaaagagttcttatcacactttactgtcttcgcactttcttgtgttgttggttattacgttgtttggaatgtcagccattcattgcacaccccattaatgtcggtgacaaatgccatttcaggtatcattgtcgttggtgcattactacaaattggtagtggtggttgggtaagctttttctcatttatcgctattttaattgccagtattaatatttttggtggatttaccgtcactcaacgtatgttgaaaatgttccgtaaaggataagggagacaattatgtccagcggtgttgttacagcggcatatattgtcgccgcaatattatttatttttagccttgcagggttatccaaacatgaaacctcaaaacaggggaattactttggtattgcagggatggctatcgcgttatttgcgactatctttgggccttatgctgataatgtaggttggatcattgttgctatggttattggtgccgttattggtatccgtttagccaaaaaagttgaaatgacgcaaatgccagagttagtggctattttgcatagttttgtaggtttagccgcggttctggttggttttaatagttatctagatcacaatcctgccattgatcctgtaatggccaacattcatctcacagaagtctttttaggtatctttatcggtgcggttacttttaccggctccattgtcgcttatggcaagctaagtggcaaaatgtcatccaaacctatgatgttgcctaatcgccataaacttaatttagcggctttagttatttcatttttattaatgatctggtttgtcaaaactgacagtgttggtttacaagtctttttaatgattgtgatgacagtcattgcattagcatttggttggcatttagttgcctccattggtggtgcggatatgcctgttgttgtgtcaatgttgaactcttattcgggttgggccgccgccgccgctggttttatgttaagcaacgatttgttaattgtaacaggggcattagtgggttcatcgggcgctattctttcttatatcatgtgtaaagcaatgaaccgctcatttattagcgttattgccggtggttttggtacagatggtagcagctccagtgacgaaggagagatgggggaatatcgtgaaacaaccgcagaagaagttgctgaactattgaaaaactcaacttcagtgattattacgccgggttatggcttagcagtggcacaagcacaatacccagtacatgatataacagaaaagcttcgtcagcgtggtataaaagtacgctttggtattcacccagttgcgggtcgtctaccggggcatatgaatgtattgttagcagaagcgaaagtaccttacgatattgtcttagaaatggatgaaatcaatgatgattttgctgatacagataccgttttagttattggtgcaaatgatactgttaacccagccgcacaagacgatcctaatagtccaatagcaggtatgccggtattagaggtatggaaagctcaaaacgtgatcgtgtttaaacgctctatgaatactggctatgcgggggtacaaaatccattattctttaaagaaaatacccaaatgttatttggtgatgctaaagccagtgtcgatgcgattttaaaagccttgtgatctgtttagctaataatctttaataaaaaacgcccgactatttaagtgatagcgggcgttttgttatacagtattaaaagcgttattcgttgtctgaatcgacagtgataggacaggtaaagccatcaggtttgatagcgagtaaatcacattttatatggtcgatcagctgttctgctgtattgcctaagaaagcggcagaaagtccagttctccctaaaatacctaatacgacaatacccgcatttagctcttcgcatacttgagggataacttgctcaggcaatccttctttgacatgtgttttttcctcaggaatagagaatttctggcgaagctctttcatcgctataaggtgttgtccacgcaaagcattgttataaaggttaggatcaaagtcaggtaactcaattgcaatattaatgggtgcaacagggtaggcactgagtaaatgaacgtcgggatctttttgtatacggtgagataaatcgtttgttaattcaattaactttaaatttaatgcatcatgatatgactcttcattggacagattagcggcgacaacaatagtgccgtattctggccactctttatcttttaccatccatacaggagcagggcattttcttaacaattgccaatctaggggagtaaaaattaaggagcctaacttatcatgttgatgagccattttaatcagtaagtcatgcttatcggtgatcacttcttcaataatggcttcatacggtcggttatgccaaatcacttttatgtcgatttgaatgccggcttcaagataatagcgagcttgctgttttatccaagcggttttttgattaatcacgcctttgcgcatcgcattacgttcatcgggagataaaagggtggtcatgtcatatgagagatcataaacaggtagaaaagcttttatccgcccaccattacgctgaacgatataaacagcacgacgtagtgctggttggtcatcttggttaggatcaatgacaacgagaaggttttgatatttttccattgctatatcctctttagggctggatttatccatctacatttttaaagataacccaagaagctaaaatgcaatagcacaaaatagaaaacgggacacaaatttgtgtgccccgttataaaaataggtgatgtaatgtaaaagattaagcttctgttgaggaaggcagtttgcctgcgagttcacttaacatttcactatcttcaatagtgatgtatttaccttttacacttaacataccacttttctggaaacgacctaatagtcggctaatggtttctactgtcaggcctaagtaattaccaatatcaccacgagtcatggttaaacggaactcacgaggtgaaaaaccgcgctgcgcaaagcggcgagagaggttataaataaaggcggctaaacgttcttctgcatttttctttgatagcagtaagatcatctcttggtcacctttgatttcgccactcattagacgcatcatttgttgacgtaaattaggcattttgcctgataaatcatctagtgtttcaaatggtatttcacaaaccattgatgtttcaagagcttgtgcaaagcttgggtgttcggtgttgataatggcatcaaatccaaccaagtcacctgcaagatgaaaacctgtgatctgttcgtcgccttcttcagtgatcgtataacttttaatagttcctgaacgaatggcataaagtgacttcagctcatcaccggctttaaacaaggtttgacctttctggataggttttttacgctcgataatattatccagttgatcaagctcatgctcgtttaaagtaaacgggatgcagagctggctaatactgcaatcttgacaatggattgcacaaccgccagattggattcggcgaacgacgcgtttttctgggatcataagcttgctcattacaaataaaaatattgatatgtgtcaattttaacacacattgctgtaattggtaaggggaataatggtacgcatagaaataattctgaatgtaaaaaacgatatagattgattaagcccgtgttttgtttggtgacttatttagaataatttgcgctaaccctatacacgattggtatattattcgattttttaaggaagtcatagggtatttgctaaattatctttggtaaaactaaaaattaggagggaactcaagaaattttattcaaggattaacatcttattcactttattttcttaacttttcgttttgccaacagaaattaatcatctgttaacacttcctaagtaaagttagctaaatgtatttttgatacaacttaatgctaacttgaattagcttttccttataaaatggcagatcccatacaaagacgaatggagttttgaaacattcgcttacctattaagtggtattgatatgtatcaataagggttatccactatcttttatcattttcattaataaaaatagttatgtgagaatgatatgtctataaaaaaacaagaaaaaaggcttgctaatcaagaggggatgccattaacgcgtcgtcattttgtacaagccagtgcagcattagtgagtatgccttttttcgcacaaaatgcacaggccaatcttgataaaagcctacctattgccaacattgatgagaaacctgctactgtcgtcgcaacatgcagcacctttgactgtggtggtaaatgtgatatccgagctcatgttaaagagggaattgttacccgtattaccacaagaccagatgctgatttagatgaacaaatgccgataatgagagcctgcgtaagaggtagaggttatcgtaaattcacttatcatgcggatagacttaaatatcccatgaaacgtgtgggtaagcgcggtgaaggcaaatttgagcgtatctcttgggatgaagcaacctctttaattgctgagaatgtaacacgattaactcaacagcatggtgcagcaagtcgttttcttacggtaaataccgccgtcactggggggatcttctctggtgatactatgatgaaaaaactctttaatctcacaggaggatatcttccttattatcactcagtgagcttagggaataccgctaaagtcacaccttatacttatggcgtatctaaaacaggaagttctcttgatactttagcggatacgcctttagttattttgtggggacataatcccaacgaaaccatttttggtcacaccaatcactattttcaaaaaatgaaaaataatgggaccaaatttattgttgtcgatcctcgttattcagatacagcccaatctttagctgatcaatggatcccattacttcctaccacagataatgcactgatggatgcaatgatgtatgtcattgtgaccgaaaatttacatgataaagcgtttatcgataaatatgtgctaggttttgatgaagatcatatgcctgaaggggtgccagctaacgaatcattaatggcttatttattagggaaaaaagacggtatagcgaaaaccccagaatgggcgacaaaaatcacacgagtcccagccaatactatccgtcaattagcacgtgaatatgcgatgacaaaacccgcggccttaattcaaggttgggggccacaacgtcatatttgtggtgaacgtaccgcccgtggttcaacgttattagcagcaattactgggaatgtgggtaaaaaaggcgcttgggcggctggatatggcggaattggtaaccgtcaatctattcgtggtcctaatattggcaaaaatccggtaactgcacaaatatccattatgaattggatgcaagctgttgaggatgcgagcaaagtgacgccagaagatggccttattggcgtcgataaacttgatagtaatatcaaaatgatcttttctttagcgggtaactatcttgtcaatcaaaaccctgatgttaatgcggcagctaagttacttgaagatgaatctaaagtagagtttatcgttgttagtgatctatatatgtctccgtcagccaaatacgcagacttagttttaccagaaacgagctttttagagcgttggaatatcggtaatacatggggaacgggcaactatttcttactgtcagaaaaagtcgttgaacctgcttttgaaagacgttctgattatgaatggatcagcgatgttgctgagaaaatgggagtcaaagaggcttttaccgaaggacgaacagaaaaagagtggatagcttatctcgttaatactaacaaagaacgctttaaagatagacctgatttcccaacttttgatgaattactcaagactcgccgctatcttttcaaagatgcaccttttgttgcatttgaagaaaatattcgtgatccagaaaatcatcctttcccaactccatcaggaaaaattgaaattttctctaaacgtctctatgacatgaataatgtcgatattcctgcattatctcattatgttcctgcaattgaaggtccagaagataaattgaccgagaaatatccactacaaatgttaacttggaaaggaaaaaatagagctaattcaacgcaatatgctaacccttggttacaagaggtacaacgccaagaaatgtggataaaccctattgatgcacaaaatagaggcatcaaaaatggcgatatggtgcgtatctataacgacagagggatcacccaaatacccgctttagttaccgagcgaattattcctggtgtggttggtttacaggcgggggcttggtggtctcctgataaagacggtgttgatcatggtgggtgccctaacgttttgacatcaacacgtatgacaccattagcccatggtaattcacatttaaccgttttagttgaggtaaccaaagcatgagtgaattcaaacaatatgcgcctgttagcgatgaacagcttggtttttttattgattcttctcgttgctcaggttgtaaagcatgccaagttgcatgtaaagataaaaataatttagaggttgggcgccgttttcgccgtatttatgaaatacagggcgggggatttgcgcctaatgggcaaggtgcatttgaaaataatgtctttgcatacacattaacgatttcatgtaatcactgtaacgatcctatatgtgtaaaaaactgtccaacaacagcaatgcataaacgccccggggatggcattgtccgtgttgataccagcaaatgtgttgggtgtggttattgctcatggtcatgtccttatggtgcaccacaaatgaatactgaaacgggacaaatgtcgaaatgtgatttctgcgtagatttattagcagaaggtaaaaatcctatttgtgttgatacatgtccattaaatgcgattaagtttggaaaaattaaagatctacgcgctaaatatggtcatttaagccaagttcaagggttacctgattttacaatcactcaccctaatttggtcattaaaccacatactggtgcaattaaaaaaggagggaaccaagcatgagtgaatggccattagttacctttactttgttagtacaaagttctgttggtgttactatttttactgccctctatttttgttggttagagaaagaaataggtaatcaacgagcaacacgcactttgcgccccgtattactgacaagtgctatattgggatgcttaggattattagcctcaacactgcatatgggatatccgtggaatgcgtttcatgccttgcgccatatatcatcatcatggttaagccgtgagattatctttgctgctctttacctgggcgcactatgtttatataccttgctagtactaataaaaggtcatatgaataaaaccctcttagccattatcggtttactggggttagtggatattttctgtatggcttcgctttattacagcacatcgatgataacttggatgcatgttaatacctattttatgtttatcggttctgttttttctgcgggagcggtgatcacgttattgatcacttcaataagggttaaagcctttgctgatggcgaacttgctaaaaaaatagtattaagtgctttagttggtatttttcttgctgtgactatccgtatggcagagcaaccactttatttatcatggatgtcagaaatacaattaaccaatgatgcaattacttttcctcatacccctataattgcgtataatgagactttcggattaagaatatctgcatggatattgtctattatcagtatattaatgatgggatatagcctgtataaatatcgtatagctgtatttacttctgggttatctctaatttggggtagcggtattgtcctgttaattgctgagatacttaaccgatttgcattttttattgttaagtaatagtaatggagtcatgaagtatgaggcgttttattagggtagatcttcctcctgaacctatcattaatgataaatgtgttaggaaacgcctcaaacaaagcctttgtgatagctgttcaaaagtctgtcctgtggacgctatcacttttagtcttttgaacgttgaaatagataatgagcgttgtttccaatgcggtaattgtctatttacttgccctgttgacgctatagaaaatatctccccccatgaacgtagctttcaagataatctattagtcattaatcatgatgaaccactggccagtattgaagagcttttggtttggcatcgacaatatcaaatacgcggtatgaaaatagcggaacccttggttgataagtggctgccgatactcgcacaacttaatttgcaattaaaaaccttacaagagcctatttggcaattagttttagtggagcctgaaccggtcgatagtggtcgtcgctttatgctatttcgacaaaaattagatgaaaagccacttaataaaggtcacgtaaaaacaggattaaatgcaaggaaacagctttatccgcaagatagctggttccatattcaattagataaagaaagttgtattctttgttctgcatgtgccaaggtgtgtgatgaaggtgcaatcacaatcgaagataatcgctttatcattgatgaaaaacgttgcaccggttgtatgaactgccaagttgtctgttttccaaaatcaataaaagtcgtagaacaaattgctaaaaatagcacaccgacacattaccattattatgatgcacaatgtgataaatgccgccttgctttttttgcttgggagcctaatgccaccttatgtccgatttgtactcagcatcaaaaacagggatggctataacagtgtttataatttgttctatgcaaaaataaatttatctcaataacatcattacttaaataaaatgactatttttatgcgatagtgattgttgataaagatctcattcatttctaagtaaggtgacatcatgataaaaaataatgacttacctgcttttatgacgcaagtggttattactgaacccggtggcgttgataaactgcaattagaaaatagcccattaccgtcattgccccctcattatatgttggtaaaagttaatgcagcgggtgttaatcgccctgatatttttcaacgtcaaggtagttatccaccgccagccgatgcatctcctatattaggattagagattgctggggaagtggtgaaattaggtgaacattgtacaaaatgggcaataggtgatcgtgtttgtgctttagttgctggtggcggttatgctgaatattgtttagtccatgaagatatcgctttaccgtcgcaaggattaagcgatattgaagcggcagcattacctgaaaatttatttactgtttgggcaaatctatttcaactcggtcagttaaaagcaggggaatcggttttgatccatgggggcacttctgggattggctctatggcgattatgttagcacacaatcttggttgtgaaatttacacaacggtaggttcaaaagaaaaagccgaagttgcccaaaaattaggggctaatcatgttattaattaccgtgagaaagattttgctacagaaattcctgtattaactcaaggtaaaggcgttgatgtcatacttgatattatcggcggcgattatgtggaaaaaaattatcaagttgcggcgaaatttggcagagtgatccaagttggcatgatgaaaggggcccctaaaaacttaaatatgatgccactgatgcttaagcgattaattcatacaggttctaccatgcgttctagaacgccagaagaaaaaacgcatatagcacaagaattaaaacaacaagtatggccgttgattatcaaaggtcaaattaagcctattattaatgcggtcttttctttacaagaagttgccaaagcacatcaattaatggagtctggtgacttaattggtaaagtagtgcttgagattgatatgaataaatcactggtgtagagctaaaataaatttattttatttattataagttataaaagcattctcattctcaatcacgattattctgaaaaaacacataataaagatattatgtgtttttttattctctataaaaaatttaagaagctttaatatgatcctgtgctttttgcgtcattataaaaataaacctcacttaataatccatcttatctaagataaaaaatcacttatttaaaataaaacagatttaagtatcgactatggtaaaaatattataataagttttgaaaaatagcataaatcaaaattgataatgaaatttataaactaattaataaaactaaatcatttatcatgaaaaagtaaaaactttagaacgaacttggaaaatcttatctgatatcaataaaataaagaagattcttactcatcatgtagtatatcatttaaaaagagactaattatttacgtaaaataaactcaattctgattaaaattgataacaaaaatttatatataggtgcgatgatggcaaatcacaaagaaacctgtctgagtgctgcagagcgtgtgtttgatacccgaaccgtggataccctaacatgttatcatcgagagatggtaaagatgttgatggatagtgagtccttttattctagtccaaataactcacagataaatactaatgagagattagagaacaaaataaaaagcaataccattgaaaataaagctgtgaagggatcttatggtgatattttaaataatttaaaccagcagctaatgaataataaacctgagattgagccttatttctcacattacaactctcccgtcatgcgattggcgaaattaggctacctttctgcactggcctataatgctgataatgtttttaacaaacattcacccatacaaaaacagcaagagcaaaaaataactcatgatttgtgtaaactaatcggttttgaaccagataaagcatttgggcatattaccaccagtcatgtttttgcttgttatgaaattttgtgggctttgagaaatttaaaaacactgccgatggcgattgcacgtcatccaaaatcaagagatctggttgcagataaaaaagcatttgagttatttaatatgtctatcactgatattttatccatcagtgaacagctatatgagcgagatatttttgatgatgtcagccatttaacttgtcgtggcaccggcatgacaagaacgatgcatttaggtaaattactagtaccgatataccgcttcgaattttggaagaaggcgatggatatcttggggttaggttatgataatctcattgccttaccaatagatgaagagtttaaaacagatatagctaaaacgcgtcatattgtgcttcgcttaatagagcagggagagccgatactcggtattattggcgtgttaggctcatcgacatacggtagcattgacaaacttaagcctcttttcgaattacgtgaagagtgtgaaaaacaacataacaactcattctatattcacattgatgcatcccaattaggctatatgaaaagcctgtttcttgacgaaaataatagcatcatcccttataacatattgtgcgataaacttaagcaagaagcacctttacttgagttaacctcagatatttatgatagttttactcagctatcaagagctgattctgtttcttttgagccatttcaagcgggattttctccttatcctacggggattgtttgtataaaagatgctcgattaagtcgttttctcgctaacccgccaaaactgtgcccagaagaggggaatattcccgatgaaattgatgggatccaatcagcacctgcggttgcatcaatgtgggggatccatcagctatatgcttttaatcattttgggtatgggcaatgcgctcaaaatcaatgggaagctagagtaaaactggaacaacaattaaaacaagagaacgaatttgaaaaatcgggtatctcttatgctattcatattttgccagtttcagattttaataaactcacttttgccattgctcttaaaggcaaccaatgtttaaaaatacaaaatcagctaaataatgctatttataaaaatttagaaataaagagccaatataagccagatctcaacctattagtgctgtgtgctcgtaatagcgatgatatacctgctcagttttgtcaacaatgtcatttaggtaaagatgaatggaagcaagttaaccacttaagtcttttacaattaacgataaaaaacactgataaatggagtgaagagcatattaaagcagggtacgactatattaaaaaagttgtcctatctgcattaaaatagctattttgttctatttattatttaacatagtaaaagttagcaaggaaaaggttgctaacttttttagtttacccttataaaagtgacgctgtcactaaagttactccttcctttgcttgtttcgtttgtctagctccttattttcgttataaatagcacataaaatcaagctcgagaatgagaatcattcataattaggagtgaatgatagaatgtaactatagataaatcatattgttactattccttatgatagataaagtaaatagatatatctaaaacttgatcatttagatatatcggattatattggtcatcaatgatttcgatatatctaaaaaatgagggaatattatgatgatccaagcgttacattcgctttatcaacaacacaccgataatggtggtcatggcatcggacgttgtggtggtaaaggtaaacacagaggacaacaccacaatggcaataatgaacattgttgtcatggtgaaagaggccatcaccaagaaggtcatggcaaatgttgccaacagggtgagcaaagtcatgagcataatgatcatgccgaacatggctgctgtcacggtgaaaaacagcaagagcatggtaaacgacatggccgaggttgtggtgctggtaaaggaaaaggaagaggccaaggtcgtcaattaaaacgtatgtttgaccatggtgatttacgtgtccttttgttgagtatgatcgcggcaaaacctagccatgggtatgaaattattcgaggaatagatgaagcatcttcaggactatatgtaccaagtccaggggttatatatccaacactgacactattagaagagcaagatttagttgttgctaatatcgctgaaaaaggccgtaaaaattatagtattacgccagaaggttcagcatttttagcagaaaaccaagaaacagaaaaaaatattcaaaataaactggcttatgcacgtgatttatcacaaaacgcagggggagtttctgaggaaatcgaatttgcggtaggaaaattaaaagcggtattacgtcataagttagtattgaaacaactttctgtagaaaaagcgcaacgcattgcttttatacttaatgaagcagtcgaaaaaatagaagccattaatgaggcattgatctctgaggtaagggaagatgaataaaacagaaacaccattacggaacagaagcaaaaataatgatattgaaaaagaagagctagaaaataatccagccgtcaaagagcaaatttgtcctaaaatgccagtatcctattttcgacgagcgttacgaaaaacaggtagactatgataatgctagacagaggctatccatatgctatagcttctgtcgttttgagcatgctgcctcgcatatttcttttatcatgtcatcatttttttcaacgcactgttttttcaaatagttctcactactaatgaggcactttataactatttcagtggttttttattagttttttattataagttgtgagactcctcgcttttttattcttagttcattacttgctgattttattgatactgttattttttaatttgtcataatattcgagataccattgatatatggtaaaaccaaaatgctacccatgcatctatatgaataagatgatagataagataaataagatgacagataagataaacagtacctatatgccttacaaacattataaaaatagcatagcaatattatttctcgcctctgccttgctacctagattttctgtggctgaaccactcactcatttacctcaaaaagatcgcatttcttattttgctcaagcggagaaaatggccatcactggtgtggctatcaaaaccaaacccgttttagccagacctgcaaaagaaggggaagtgatcaccacttacataaaaggtgaaggggttgaaactatttcggagccagccaaagcgggtgattgggttgtacaaaatatttgtccagcaacaggtaatgaagaaattttggtcagaaaagataaatttactcagcgctataatctggctgatgtagacaaagcgaaaagcatcacaccgataaggcaaggctatcaagtttttatccctaaagggattgaaatgaattattttattgttccaaaacaaaccgctgagtttgcaatggaagcgccctggggagagctacaacgttttcaagccggtgatgcagttgtgcaatctaccaccgataaacaagatatttatcggatccaacaggccgcttttaaatgcacttatactattttaaaaaccgccaaagagatttgatctgtatatatgtgataaaaagcgctaaattgaaaaaataattgttactttttatagagttaattttatagttttactgctaaaaatagcaataattagctttttttgtcattaaatcgtgtttttttgtattttttttagtcatttgcgttagtcgctacatttcgttaatctatctctatcaatttattaaactcattaggtaaaacctattgatatgatagtaggaatgtattagatattctcaattggaataggtacattagattcataccaaacaggaggaaatacaatgtctttaattaataccccaatcaaaccattcaaaaacatggcatttaaagacggtcaattcgtagaagtgactgaaaaggacgtcgaaggcaaatggagcattttcttcttctatccagctgactttacctttgtttgtccaacagaattaggtgacttagctgatcattatgaagaattccaaaaaatgggtgtagaaatttactctgtttctactgacactcattttactcataaagcatggcatagcagctcagaaactatcggtaaaatcaaatatggcatgatcggtgacccaactggcgcattaactcgtaactttgaaaatatgcgtgaagcggaaggtctggcagatcgtggtactttcgttgttgacccacaaggtatcatccaagcaatcgaaattactgctgaaggtattggccgtgatgcagctgacctgttacgtaaagtaaaagcggctcaatatgttgctagccacccaggtgaagtttgcccagcaaaatggaaagaaggtgatgcaactttagctccatcactggatttagttggcaaaatctaaaaaattctaaataagaatcaagccactaaagaagctactaacgtagttatttatcgggtgtttcggcacccgattttattgagggtgcaaaaatgttagataataatttaaaagctcaactgaaagcttacctagaacgattaacccagccagttgagttagttgcaacattagacgacagcaaacattctgctgatatccaagccttattaaaagaaattgaaccgttatctgataaagtcacataccgtgaagataacagtgctaatgtgcgcaaaccatcttttcttattaccaacccagggaaaacaactggcgttcgttttgcaggctcgccattaggtcatgagtttacttctttagtattagcattattacaaaccggtggtcatccatctaaagaagccccagaattacttgaacaaattcgtcagttagacggtgagtttcatttcgaaacctattattcgctctcttgtcataactgccctgatgttgttcaggcattaaacttaatggcgattttaaatccgaacatcacccatacggcgatcgacggaggcatgttccaaaatgaaattcaggaacgtaatatcatgggcgttcctgcggtattcttaaatggcaacgagtttggccaaggtcgtatgactttagctgaaattgttagcaaagtagatagcaatgcagaaaaacgcactgcagagttattaaataaaaaagatgcctttgatgttttgattgtcggaagcggccctgcgggggcatcagcggcagtatatgctgcacgtaaaggcttaaatacaggtcttatcggtgaacgttttggtggacaagttctcgatactgttgatattgaaaactatatctctgtacctaaaacagaaggtgcaaaattagctggggctttaaaagctcatgttgatgattatcaagttgatgtcattgacagccaaactgtcagccgtttaattccgggagcagcggaaggtgatctacaccaaattgaaaccgcatctggtgcgattttaaaaacccgtagcttaattattgccacgggtgctcgctggagaaatatgaacgtaccgggtgaaaacgagtaccgtactcgcggtgtaacatactgcccacattgtgatggtcctctatttaaaggtaaaagagtggctgttattggtggtggtaactcgggtgttgaagctgccattgacttagcgggtttagtggagcacgtgaccgtactagaatttgcctcagaaatgagagccgatgctgttttacaaaataaactgcgtagcttaagtaatgtcgatgttatcttaaatgcccaaacaacagaagtatatggagatggcactaagttaacaggactgaaatataaagatcgcactaacgattcaatgcatgatattgccttagcgggtattttcgtccaaattggtttactgccaaacacacaatggttagacggaactgttgagcgtaataaaattggtgagatcgtggttgattcacgtggtgaaaccaatattaaaggggtatttgctgcgggtgactgtacaactgttccttataaacaaattattatcgccgcgggtgaaggtgcaaaagcctcattaagcgcctttgattacttaattcgcacaacggcaaaataagcaaatcaaagataatcaataagttatagagaaaggcatcttttttaagatgcctttttttgtatataaaatcatcaagaagggctaaaaagtggctctaagtgttcaagtgtggacagggtgttgtttaaaaataacttctcaaaccaaaaaccgttttctgcctatttaatttttaagcaatttaaccattccaattaagatactttttacatctatttttctttgttcaagaaaaatgctattcaaaatttttaagcaatctatactattattccactacttaaataatctataaggaaattgattgatatggttctaaaaaagagatgttttagacaaattgctcctgcgcttattttttctttactaacaattggtactttctcggcgaatgcgaatatcgatgttcgcgatgaaaccttatttgaagcacatcagcgttttaaaacacaaattataaatgatagttttgacaatactgaagcaccttgggaagcgccagcagaaatattcaatgtagttaaatatccggccaaactaggtgatatgtatgcttatttaacccctccgccggcgaataaaaaaaataaactacctgcggtgatttggctgaatggaggatatggtgggataggaggagatgattatttttggacaccacaaccagttgaaaatgaccaaacaggagcgacgtttcgtgatcctaatatggtactcatgataccttcttttcgtggtgaaaataccaaccctggtcgctatgaaatgttttatggtgaattagaagatttagactcagctagagaatatttagcgtcattaccttatgttgatcctaaacgtatttacgtagtaggacatagcactgggggaacgagagcattattggctagtgaatacagtgataaattcagggcaatattctctttaggaggaatacctgatcttaaactacgcacagaagggcggatgatggttgaattaccctttgataaaaataacgaagaagaatttaatgtccgttctgtataccgctatattaaatcaataaaaacaccaacattttattttgaaggtcatgattatttttgggatgaattcaatgaattacgtgtggttgcaatggaacacgatattcctctgaaaatttataatataaaaaatggagatcattttaatattattgtccctgtcagccaattaattaaagaaaaaatattgcaagatactgatacaaataaagaaagtaatattcgattcactaacgaagaaattaagtggatcaataaaatggtgaaataaattttaaaataataaaactgctctattatcaattagataaaagagcggtagtatctattttgagccgatatagtgcgtctaaaatttcatcatatgtgcttaaaagtatttagaactttgttgacagtctctttcaattatcaaaacagaagatgctagaattgtttatattgtcttataaacatatagttttaggtaaaaatattaagtatattatatatgatatgaaagaatacaattttaaaatagaaaggattgaatatgaaaactaaaatagtttatcaatggaaggaaaaaagacgggatagactctcttttttaggagcagaagtggttttttctgtgttatttggtattgtaaacggtttaatatatatgttatttatgaccttgttacctgattccgttgagaatgatcctgataaattatttttttaccaattctcttttagttcttatggtatagtcgaattcatattattaatagcacaaatctacgtatttgcacttattttaactcaacgagtaagagatttcggtttcaaatatcctatcactattgcactgatctttaccattggcaccatggtccttacaccatatccattacttatttcttcagatacaatggtaatagtgcgttttattttattattaggatatgttattgcattattattaccatcttcgaataatgttgagtgtaataacgatgaaaataataagataaccatactaaaatagttaactaataagtgaattatcctaagtgtatcaggcgtaatggatacacttaggacattataaaaataatattataatagtggtataagaagaaaatataaaaatagtgaataataacttctataattgcaatatctacagtgactaatgaggttataatggaaggtgttcaatttaggcttgcggagcctcatgaagcaaaacgattatggtatttaagaaataaagcgttacgttttggctgtcaacatgtctatccgcccgatatattagccgcttggactcctgatgaaatgcctgacggctatagacaatctattattaataatcctttctatgttattgatgataaaaagttgtctattcccgtggcttctggttttttagatcttaaaactggctttgctgaagccatttttacattaccggaatgcatgggaaaaggatatgcaggacttattcttaaacagctacaatatgaagctaaacaaagaaattttgttcagttatttttagatgcaacgcctaatgcgatgctattttatttaaaacaagggttcactgttttagaagagcgagagtactattctagcttggctcaggcaagtttacactgttatcgaatgtatattgatttataaaatttataaatagtgccttattgacataaaaattatacctagcattatagaacagaaaaagttgggcttaaaatgcgaaaattttttatttttatcattttttgaattagcttttatattaacaatatcagttggtaattttgctaatgttacgatattgtaaattatgactatttttctggggcacacactatgcaaaatgtgttgttaacgttatggcctttatttgcgttaattgcgctaggcgctattttaagaagaaataaagcatttgaacctgcattttgggtaggggctgaaaaattaaattattttttactctttcctgcattacttctcaatagcttggctaatgctcctttatctgatcctcaattacctcaccttgctggggctattttctcagtagtcatcattaccactattttgtgtgttatttttaaaaaaataaccggctggtctgctggccgttttggtgcgatcgttcaaggcaatattcggtttaacacttatttaggtttagctattgtcgctgatttatttggcgttgaaggtttaggaatagctgctttgatattagcaaccttggttcctctatcaaatgtgacttcagtgctttgtttaaccgcagggcaaaatgtaacttttcgtcaattaatcttcccaattattaaaaatccattaattatctcttgcgtaatagggattgttatcaatttatcaggaatagggcttccttttggtagcgatcaatttctaaaattgttagctgcgactagtttacctttagggcttatctgtattggtgcggcattacatttatcaacactaaaagcagaaagtaaaatgattagtattaacacagtgactcggttgcttattgtaccgataattgcatatagtgttgctaattttttaggtttgtctccattagttatgatgcttttagtcattttcttttctatccctacagccccaacttcttatattttaactcgacagctaggaggggattctgagctaatggcggggatcattacttcacaaaccatgcttgcagcaattaccttgccgatcgtattaagttttttaattccataaatttaaaggaaatgcgactaatattatttatcgtgggtgattttttatagcatagtgtcactaaaagtgttcttctcttaaatgtaattttaattattatatggttaatttaagaggaaaatatgatgagtgtaaaaattaatcacaatgatatttctagtttacagatattaagaatatcacaaggagaaaaaacaaaagatgtgatgtcattatgggataaaataaaagactggttccaatcaaacaaaagagaaaaagcactaaaaatagttgaaaacattgtagttgaagagaaatttgatgacaaaaacaattttaaaatgctatatcatgttttaatgctaaaaactatggcttcagatgcatataaagaaagaataaaaatcaatactaatgataatgataaaaatattacgatttcaatagataattataatatttctataacggatatagacaatgaacaacttaataaaatgtcaacaataattaatgcatttaatcggcattcattaattttttctaatgaaattgcattgaaatgtctatatgaaaagttagataaaaatgagcttaatgatcaaatttttgctgagttgtatattgaattagataataaaatacgttctggtgaaatagacttaaagcttaataaaagtaactttaatcaagttaactttagtgctataagacagctcgtaagcaaagcgatagaaaatgataatactaacttagatacagaaaatgataatgctaacttagaaaatgataatgctaacttagaaaatgataatattaacttagaaaatgataatgctaacttagaaaatgataatgctaacttagaaaatgataatattaacttagaaaatgataatgctaacttagaaaatgataatgctaacttagaaaatgataatgctaacttagaaaatgataatgctaacttaaatataaaaaaggcactaataaaagatataaatagaaatacttatattttcaatggtaaagaaataaaaagtaaagatcaagacgaggcaatggaagaatttgaaactttaactaaagatatctcagagaaaaataaaaaggcaatttattatttactaaatcaagaagggattaccttaattaaatcatataatgattcttttgattactacacattaacaacatctttttctatgagtaatgttgttaagcaagaacaaatttatagtataaagactctttctgatgatttaattgaattaaaaataaaattttttaaaaaaagtagcgataaaataaatctaaatattcccttagctcaaccatttgaaagtaagttatataattttatctatgatatggttgctattaataataatatcgaaataacttatgataaaattttaaatgaaaagatgaacgagataataaaacaactaaataataaaaaaccaaggctaggagagctattctcccatctattgagtcgaaataaaatcattaaagaagacagcgttgatattacgttaaaactaaataaaggacaactagtctcattaggtggagaatgctcatataatttttattaattttatcctttggtcaaaatagagcttcttgctatgatgtgaaaaacgtgagaataagtagaggctcctttatgtcaaaacctcataacccagaaattcaaaaaattattaatcagttaaaacaacaatatcaaaatgctgttgatgccttacgtaatgctattattatgtatgctcaagatggaaaattacctgatataaaacaaagggctgaaggtctatttgcttatccgcaattaaccgtacattggtatggtgatgttaaaaaagaagataaaacaagagcttatgggcgtttatcaaaatcaggtacttattctacgactatcaccaatccaactttatttgaaaattatttaactgagcaactgcaacttattgcggatgcttatcatgtctcttttgaagtgacggcctcaaaacaagagataccatatccttttgtcattgatggcactggcattggttttgatcggtcaatgagcgcctctttagcaaaatattttccgactaccgatctctctaaaattggtgatgatattaccgatggtttaattgatgacagcgagcttttacctctttcacattttgatgcactacggacggatttttctttggctcgtttaaagcattataccggaactttacctgaagatgtgcaaccttatattttattcaccaattataatcgctatgtggatgagttcgttcgttgggcctgtgcacaagttgctgataaaaatagtccatattgcgcactttcttgtgcaggttttcagcaaataaccgccgatacggttgatccggaaaaattaatttctgatctgacatggaaaaaatatcaaatgcccgcctatcatttaattgcaaaagaagggccgggaataacattagtgaatattggtgttgggccgtcaaacgccaaaacaatttgtgatcatctggcggttctacgtcctcatgtttggttaatgattggtcattgtggcggcttaagagaaagccaattattaggtgattacgttttagctcatgcttatttacgagatgatcatattttagatgctgtattaccgccagatattcctattcctaatattgctgaagttcagcgtgcactttatgatgccactaaagccattagcggtaagcctggacatgaaatcaaacaacgattaagaacaggaacggttgtgacaacagatgatcgtaattgggaattacgtttttcagcaacatcaaggcgatttagtttaagtcgagccgttgccgtggatatggaaagtgccactattgccgctcaaggttatcgttttcgcgttccttatggcactttgttatgtgtatctgataaaccgttacatggtgaaataaaattaccaggacaagctaatcacttttatgaaggtgcggtatcagagcatttgcaaataggtattcatgcaattgagttattaaaagacgaagaggataaattacattctcgtaaattaagaacctttaatgagccgccatttagataagccatagctaaaattaataagatgaaaatttatatacccaatatcattgattgaattgggtatatttttacaatataaaaggctaaaaacgtaaatgtcgagccgcttttctaagacgatcatcaccacgtctatcatagcgctgtgtagtcataatactggcatgacccatggcatcttttacggttacaatatcttcgccattatctaacattgcagaggcaaaagtgcgtcgcagatcgtgaggagcaaatttatcaatgccactttcttgttggcgtgtctctaaaatataataaatggcttggtctgttattcgttcatctgttacatcatcaaagcggcgaatacgtgtgaaaagggcgccatcttgtgctccccttatttcatcgatccataactgaacacgctcccaagtatcttctggcatataggatattctttctttattaccttttcctctgacaataaaagcttgatcacgaaattgaatatgctcgtaattaagcgcaacaatttctgaacggcgtaatccacagccaagtagtacacttaatatggccgcatctcttaaaccttttgaggagtggtctttttcacaacagcgaaaaagtgcgcgaatttcatgtccagtaagcgctcgacctttaggtaatcgactgcctcttaccgatttaacttggcgaatatgttgatagctttctgtatccatcaatttcatcgcccatgcttctaaagcgacaccttttagtgcagctaaataagtgttaatcgtggcgggtgctttatccgcatcagataacatgtcgataattgcttgaatatggtggcggcgaagtgctccccattggcaatgctttattgaagagaagccaatcatttttgccacgatagttaaaaatgatcccatcgtttggcgactacgtttagaacctaaactgcgtaaataagccagtgcagggttagtttgtgtcggagaggtgaaagttgcattgagatctaataatggttgtttttccgccaatacaagtgatgtttctggtgttatttcttgatcgtcgtggtgaaaatccacagcaatttccttattaaatcaatataactatgctgaatattctaacagatctaaaaaagaaaaaagctactttttcaaaggatcattttaataagtagaggcgatcatgtttgtttttagtgcataatgtttgttttataaacggttttagagtgcgaagtgaacagtgggttttacccatgaaaggaataaagagatcaaaatagagggatgatcgtggaaatggcttaatattatgcctttggtttatctgtatttttaataacagtcgctaaaaaccaaaggcatagttttaaaataatgaaggttaatctttataaatggcgactagtggtttgccatcattaccaatggtgcctcgatacattccctcagagttaaagctcatcgtatagtttccagatttgtctaatacgataacaccaccacttccatttatcgcttttacttcatcaagtgcattttgtgccgcttgctctagtggtagtttttgatatttaacttgggctgcaatattaaatgcggtcagcgttctaataaacatttcacctgatcctgttgccgataccgcaaccgtttcattatccgcataattacctgcaccgataataggggaatcgcccacacgcccataacgtttattggtcattccacctgttgatgttcccgccgctaaattaccatgttggtctaatgcaacagcgccaacagtgccgtatttataatcatacatcatcggatcagcaaaaagagccgcagttttaccatcatgatctaatacaacttgttctttttctaatgctttttgtagttgttgccaacgatattcagtacgaaaataactcggatcaacgatggttaacccttgctctttggcaaaaagatcagccccttgagaaaccatcataacatgtggacttttttccattaccgcaatagcggcattaatcggattttttactgtggtaacaccagcaacagcacccgctttgcgcgttttaccatccataatagaagcatcaagttcgtttctaccatcgtgagtaaaaacagcacctttacctgcattaaaaagaggagagtcttccataacattaatcgatttttgtacggcttcaatactggtgcctccactatttaaaacagcatatccagcatttaatgcttcggtcagtttggctttatattctttttcttgttctggggtgatggtatctttcgttattgtacctgcaccaccatgaataacgaggcggataggggcttgtgtattattagctaacgcagaagaggcaaaaagagtacaaagggtaagtgtagcgagcttatagttaatgtttttcatataaaccttctcttaatcggattgagttgtgtatttgcagggatgttattactttaattgtatattgttatttgatatataattattaactgcaataatcactatataaaaactttacctaataagtggtctgatgacaggcaaaaataacaaataatttcaatttaaattaatgctataataatcaaactgttatatttaaggagttttatgcaattaatttaaaattaaatcttgcaaataaaatattaaaataaaagtatgttggttattatttatttttaatgttgttaaatttatagcaaaatcaaaaaatagctaacttcatcaacattaaatatgtgacctcgatcaattatcgtaaccaagtgttattattatattttgattttaatgaagctaatggatgctaaattttatacattttgtgtgttatctcgaataatcaaattttgatagtgtattatgtgataaaagtactacattaaattcacacaacacactatcatattcttattatattttataattcatatggttaacttttgtttttctctttttttattttattttaattcgctttatatatataaatggactatttttaaagaagatgaaataaaattaaaaattgttatttaactattttcttacacacagtaaatcacaaaaaattgggttatttatggcaaaaggaaggttaaataatttatatgaaaaatcaaaaaacgaatcgtttttttgtttacggcattattattgttgcaattattgcagcaggtattttttggtggaaaacacaatcaccagcactccctgatgggtttgctcaaagtaatgggagaattgaagctactgaaattgatatttcaaccaaaacaccaggaagaattgacactattttggttaaagagggggattttgttaaagcgggtgaagtgttggcaacaatggatactcgtaccttaaaagagcaacttcatgaagttcaagcccaactagagcaagccaaaagtagcgttatgacggcagagtcggcactttctcaacgtcaaagtgagcaagttgcagcgcaggcggttgttcgtcagcgtattgcagagcttgacgcatcagtaaaacgccttaaccgatctcgagcattagttaaaacaaaagcaatttccattcaacaactggatgatgatatagcaagaaccgaaggggctcgtgctgctgttgaagctgcaaaagcacaagtgactgcaaccattgcggcaattgattcggcaaagtctggaattattcaagcaaaaactaaagttgatgcagcaacagctaccgaacgacgtattatggctgagttggatgatagtatcttaaaagctcctcgtaatggccgtgtacaatatcgtgttgcggaacccggtgaagtgctaggcgctggcggtcgagtgttaaatatggtcgaccttagtgatgtgtatatgacattctttttgccaactgaagccgctggtaaagcagccttaggcagtgatgtccatattattttggacgcagccccacatattgtgatccctgcgaaaacgacttatgttgccagtgttgcacagtttacccctaaaacggttgaaactgacaatgaacgtttgaaactgatgtttcgtgtaagagcgaggatctcccctgaattactagagaaacaccttgaatatgtcaaaacaggtttaccgggacgtgcctatattcgcttagataatagccaaccttggccgactgatttagaggtgaaattaccacaatgagtcaactaatgagaacgcaaagtcattctcatatcattgaattgactcatgtatcccaacattatggtgataccaaagcacttgatgatgtgacattgactattcctgccggaaaaatggtcggcttaataggcccggatggtgtcggaaaatcgagtttaatttctcttatttcaggagccagagaaattcagcaagggcaagtgatagtacttaatggtgatatgaatgatgttaatcaccggcgagctgtttgccccaaaattgcctatatgccacaagggttaggtaaaaatctttatcacacactttctgtttttgaaaacgtcgatttctttggtcgcttatttggtcaatccaaacaagagcgagaagagcgcatcaatgatttacttgaaagtacggggttagcgccttttaaggatagacctgcgggtaaactatctggtggtatgaagcaaaaactggggctttgctgtgcattaattcatgatccacaattgctgatcctcgatgaacccaccacaggggttgacccattatcacgggcgcaattttgggagttaattaatcgtatccgtaaacgtcaaaccaatatgagcgtattggttgcgacggcttatatggaagaggctgagcgttttgattggctggttgcaatggatgcaggtaaggttttagccacaggtcatgcggaagaattaaaggcgcaaacggcgacagatgaattagaagctgcttttattgagcttttaccggaagaaaaacgcaaaaaccatcaaaaagtgattattcctccacgggataaaagtgatgacgatattatcgccattgaggccaaagaattaacaatgcgctttggtcagtttgttgctgttgatcatgtcagttttcgtattcctaaaggcgaaatttttggttttctaggctcgaatggttgtggtaaatccaccaccatgaaaatgcttacaggtttacttgaggcaagtgaagggcgcgcttggttatttgggcaagaggttgatccaaaagatatcgaaacccgtaaacgcgttggttatatgtcgcaagcattctcactgtatagcgaattaacggttcgacaaaatttagagctacatgccaaactctttcatatcccagaacaggatattcctcaacgtatcaaagaaatgagtgagcgttttaatttgaccgatgtggaagatatgatgcctgacggtttacctttaggtattcgacaacgcttatcgttagcggtggcagtgatccacaaaccagaaatgctgatccttgatgaacccacctctggggttgaccctatcgctcgagatatgttctggaagctgatggttgatctctcaagacgtgacggtgtcactatttttatctctacccactttatgaatgaagcggcgcgctgtgacagaatgtctctgatgcatgccggaaaagtgctagtgacagatactccggctaatttagtgaaaaatagtcaatttgatacactagaagaagtatttattgattatttgaaaaaagcatccggtgaaacagaaacgcccgatattgaagataaacagctacaattgcctgcctctagtgaagaaagtgcggaaaaagcgttaaaacaacgatttagtttacgccgtttatttagttatagcattcgtgaagggatggaattacgccgtgacccagtacgccttaccttagcattactaggcacggtaatattgatgtttattatgggttacggcatcagtatggatgttgaaaacctacgctttgccattatggatagagatcaaacagggctaagtcaggcttatagtcaaaacctatcaggctctcgctattttattgaaaaagcgccgattaccgattataaccaacttgagcgtcgtctccgcagtggtgatattactgttgcgattgaaattccgcctaattttgctcgagatgttgctaaaggacataaagtaaaaataggggtttggattgatggcgcgatgccaaatcgtgcagaaactgtccgtgggtatattcaggcaatgcatctaacttggatgttagatatggccatgcgtcaacctaccaatatggttgatcaattttcccccattgatatcgaaacccgttatcgttataaccctgatgtaaaaagtttacccgctatagtacctgcggttattccgttgttgttgatgatgatccccgcgatgttaagcgccttgagtgtggtacgtgaaaaagagctaggctctattattaatttatacgttactccggtcactaaagccgagtttttattaggcaaacagatcccctatattttattgggaatgtttaacttttttatgctctgtgcgctttcggtatttgtttttggtgtcagttttaaaggaagcatgttaacactctcattaggggcgttgctttatatcactattgctacgggaatgggattactgatttcttgttttatgaaaagtcagattgcggctatttttggtacttcaattattaccttaattcctgctacgcaattctccggcatgattgacccagtatcatcattagaaggtattggtaaatggatagggcatatttatccgacttctcactttcttactatcactcgaggaacgttttcaaaaggacttaacttatttgatttgccttggtcttttattccgttacttatcacgatccccattgtgattgggctgagtgtctttttcttgaaaaagcaggaggcttaaatgtggcataccgtacaaaatatttttaatttaggaataaaagagttacgaagtttatcccgtgataaggcgatgctggcattaattgtgtttgcctttaccgtatcaatatactcatcggctactgtaacaccaggctcattacaccatgcgccgatagcggtggctgatcaggataaatctcaactttcggcccgtattgtcaatagcttttatatgccttactttttaccccctgcagatattacacccgagcagattgatggtttattagatagaggaacttatacttttgcgttagatattccgcctaattttcaacgcgatctactcgcaggacgtaagccagaaattcaagtcaatattgatgcaacacggatgagccaagctttcttaggaaatagctatattcaaaatatcgttatgggagaagcgaaaacttttcttgctaaagagcgcactaacgatccactgcctgtggatttagaagttagaatgagctttaacccaaacttaacacaatcttggtttggctcagttatggcgataatcaataacattaccatgctatctattgtattaaccggggcggcactaatacgagagcgagagcatggcactattgaacacttattagttatgcctgtcacaccatttgagatcatgctgtctaaaatatggtcaatgggattggttgtattgttagcgtcggccatgtctttagtgctagtggttaaatcactgctacatgtgccgatcgaaggctctgttttgttatttatgtgtggggtcgcgttaagtttatttgcaacgacatccattggtattttcttaggcactatggcgcgctcaatgccacaatttggtttattgatgattatggtattgttgccattaaatatgttgtctggagggatgacctcaagagagagtatgcctcagtttgtacaagatgtgatgcaaactatgccaaccacacattttgtcagccttgcacaagcgatattgtatagaggcgcagatttctcgattgtttggcctcaatttatcgttttaattattattggctcagtcttttttgcattggcactgttacgttttagaaaaacgatatctgcaatggcttagtcgttctgataaaccgaaaaaagagacttaaggcataaaacgataaccgatccccgtttcagtaattaagtgcactggacaggtgggatcggtttctattttctgacgtagatgccccatataaattcgcaaataatggctatgctctacaaagttaggcccccaaacatgctgcattaaatgacgttgagttaatacttttccactattgttgacaagttcactgagtagacgaaattcggtcggagtaaagtgaatgggtacgccttggcgagtgactattcttttaacccaatcaatagtgatatcaccaaatgtaaattgagtcgtttctgtttcttgtttgacaaagcgacgtaatgaagcacgaacccgagctagtaattcactcataccgaagggtttagttaaataatcatcagctccagcgtctaaagcatcaactttatcttgttcagaatctctggcggataacacaataatcggcgtgctactccattggcggaaatcttgaataaagcaaagcccatctttatcaggtaatcccagatcaagaatgactaaatcaggttttcttgatgctgcttctattaatcctcgttgacattctgaggcgtcataaacacgaaaaccttcgttctctaatgcaaggcgaacgaatcgtaagatctctttttcatcttcaacaatcaatatgttatatggcgtcactgttttatttcaatctcatcaatattcggtagtgattttaaaggtaaaacaaagtgaaaactggctccaccttttttattattttcagcccaaattttaccttcatgtaagtggataatagcactgcaaatagcaagacccagcccaacccccggaatggcggactcttttactgcacgtgaaaatttattaaaaataagctgcaattgttcagtgggaatacctgcgccttcatcccaaacttcaacatgaatttgatcctcttcaaccgtagcttttatgcctaatttagtttgtgatgcggtatatttgactgcattttctaacaaattagttaacacgcgctcaattaacagactatcgcaatagagtaataaatcagctggaatatcaatttgtaatgggtgtttatcaagtaaataagagagtgaacgtactgcacttccagcaatttcttgcagtaaattccactgcaagttgacttggatccccccagattgaatacgtgccatatccagtaaattgttgactaagcgggaggtcgtcaaaatttgttggcggatctgactaacttgttcagtatgagcagagccctcagcacttaagtctagaagaagaatttcagactggccaaacaggacggtaagtggtgtttttagatcatgagaaagggcggctaagagcgcatttcttaattgttctcgttctatattaatacgagattgttcggccatttccgcctgttgtaaccgttcaagagcattggcaattaggccattaaatgtctgtaggagttgctgttgttcaggaataagtacttggcgtagattatttggctcaatcgctaaaatcgctaatacttgttgagatgcgctaatagggtgcaactgataagggacactaggtagggtatccgttcctgcacctgcgatttgatctttatcccaacaccaacgggcaataccactatcaatgggaagttgtcccataccttcagcattgtatggcgttaattcaccatgatgattaggcattaataaacaaactttggcatcaaaagcacttgataagaaatgataactagtacgtaccacttcttctaaagtcagtgcccgactcagctctcgggtcatttcaaataaatgacgagtgcgttgttctctataacgagcaacccgggtttgataacgcattcccgcagttaaattacccaccactaacccaacaatgagcattacggaaaaagtcactaaatactgcatatctaatacagccagtgaaaaatgcggttgtacaaagaacaaatcaaagcttatcacattgattaaagcggcaaaaatagaaggacgacgaccaaaaaatagcgcgataagaacaacgcctaataaataaagagtaactaaattcgccttatctaacgctaacaaaaaagtacgtgaaaaaagcgtaatagctagacataaaccaatagctgttagataacctttaagattttggcgccatttatcattttgtggcacaaatgtttttgttttataacgcggctcttcttcatttaaagcgacactgataacatgcaagtcaggtgcataacgcgctaacctttctgcgaaacgcatacggacccaacgttttaaccattgccacttttgataggggcgttgaccgataatcaccttgcctaaattatgctctctggcatagcggatcaccgctttttccgcttgattatcagaaaggatcgccgttcttgcccctaggtgttgtgctaacttgagggaatgtaaaatagcacggcgtttatgctcacctatctgatgtagctttggtgtttcaacataaatagcatgccattggcaaccaaaagcagcagcataacgagcagcagtacgcactaatttatcatttcttccatgagcaccaagacaaaccattaaactatcagtagtatgccaaacaggcgtaccaccttggctatcacggaattcttttacttgggaatcaacgcgatctgccattcgtcttagggcaagctctcgtaatgcaatcaaattacctttacgaaaaaaatgctctattgcacgctctgcttgtcctgccagataaactttgccttcatttaagcgctgttgtaggtcgtctggtggtaagtcgaccataactacttcatcggcattatcaaagatataatcaggaatcgtctcttgaacgcgaatgccagtaatactaccaacaatatcattaagactttcaatatgttgtacattaatggtggttaaaacatcgatgcccgcatcaagtaactcttcaacatcttgccaacgttttggatgacgacatttatgtggattactaaaagccaattcatccattaagatcaccgcaggatgtcttgctaaggccgcatctaaattaaaggcagagagctttctaccacgataatgtaattttaatggcggtaataacggtaatccctcaagttgttgtgccgtttcttggcgctgatgggtttctacaaccccagctaagacatcaataccttgctgatgtaaacgttgagcttcttgtaacatggcgtaggttttacctacgccggcacaggcaccaaaaaagatctttaatcgtcctcgatggggtgctcgcgttaatgccagcaaatcatcaggagaagggcgttgccactgcggagcttgttccattttattacccgctcactggcatcttaataatattggcatgttacgtgcagcaggtttacctgataacgcaatccgctttattccttcccaaggagccagtgcggcattacaagagttagcttcagggggcgttgatattgtaacgtcttcattaggtgaggctgacagtatggtcaaagccggattagtcaaacatatggccattatgtctaatgaaaaatcggcattttatcctgatgttcctctctttaaagaagcaacaggttatgattgggatttacaagcatggaatatgttagttgcccctaaaggacttgataaagaagcacaagataagcttaccgcagcaatgaagaaagtttatgcttcaggtgaattagctgaatttgctaataaacaaggatttgaagtcattgaattgtatggtgatgatgcgacacaatttatggccaatgaagataaaaagtttggcgaaattataaaaaaataactgaggaaacggctgataatagccgtttttatgcctatgctaaatcgtcatatattatcatttatattttgcctatttggattatttcttattatttatagcgcctattcattaggtgattttagtgaatatggtgcggcttttatgccttcactaattggtggaggaatgattgttttttcattattagatatttttgcaaaaaagcagcaaatggatacacctttggtgacatggcatgaaataaaatttgtgttattaattattggtatcattctattttatgtgttttttgctgaataccttggttttattgttacgggatttattgttattgcaccgttaatgatgaaatacgcaaaagtaaaaccaatatttagttttattatttctgctggaattgtattaggcgtttattatttatttaccgctgtactgttagtaccgctacctcaattattttaataaatagagaaaaacagtatggatatatttattagcgcattagcttatattgattacacgacaatacttgttgtcataggcgcttgcttatttggtttatttgttggagcaattccggggttaacatcaaccatggcaattgctttaatggtgccttttactttctttcttgatccaattcctgcattagcactgatgatctccgtaggtgcatcctcgatatttgccggcgatattccaggggcattattaaatattcccggaacacccgcctctgcagcttatactaacgatgctcatacattggttaaagaaggtaaaactaatcgtgtattagggatgtcattaacaagctccgttattggtggggtgatcggcacaattattttagcgtcaaccgctccgttattagccgagtttgcacttaaatttagctcttacgaatatatgtggcttactttaattggattaagctgcgccactattgtttctggcgctcaaattagaaaaagtttgctagcactgtttttcggtattgctttagccactattggctacgatgaatttacaggacaagcccgttttacctttggtgaagtctctttaatgcaaggtgttagttttattcccgccatgatagggctatttgctatctctggtgcgattaaatattacgtcgatcgctggaaagaaaagcaaattaaattagcagttaatacagataatagctcatataatatttttaaagggctgggaaaggttgtttgccaacgtaaagggggcattttccgtagtggtattattggtacattgataggtgctttacccggtgctggtgccgatatcgctgcgtggatctcttatgcggtatctaaaaaattatcaaaaaaaccgcaaaagtatgggcaaggctcagaagaaggtattgttgatgcatcagcaagtaataatgctagtttagcaggaagttggataccttcattggtttttggtattcccggtgattccgcggcagctattatcattggtgtattgtatatgaaagatatgcaacctggaccaactctctttttatttaatccagataaactgtacgccgtttttatcattttctttattgcgaatttaatcttattacctatagcttttattgttgttaattttttaaagaaaattgttgctattgataatgcaattctttatccagcaattattttatttagtattgtcggttcatttgctattaccaatacgatgtcatccattgtggttatgatggtgatgggagttatcggctattttcttcaacagcgtaactttcctatctcaccgattatattagggatgattttagggccgatgctagagaagaatttactttcttcgttgatgaaatcggacggagagctaattaattttgttaatagacctatttcaattgtattagccagtgttttcctattaattgtcgctatgcaaattaggagcgcatttaaaaccaaataactaataagctatttattattttcaaaaaatatacacatattctatccaataccagggaaaatgcttcttaaataattaatttttaatttaagagggcaatatccgtagataaataaaaatatcgggtgtttttatgaaaaagatattaaataaaccagaaaattatgttgatgaaacattagctggcttatgccttgcacataatgatatttatcgtcaaccacaaccacgtttaattacgcgagctaacagctcagataaagctaaagtgggaattgttactggcggaggatcagggcaccttcccgttttcaccggatatgtaggtgaaggtttattagatgccgccgcagtcggtgatgtatttgcctcaccgtcagcagatctaatggctgatgcgatacgcgctgcggataatgggcagggggtattactgctctatggtaattatggtggcgatattatgaattttgatatggcctctgaaacggtagattttgaagataatattcgatgtacaacggtgttagcgacagatgatattgcttctgcaacaccagaagaagcgcataaacgtcgtggtgtggctggaatgatttatggttttaaaatggcaggggccaaagctcaagaaggggcatctcttgatgaggtgacccgcattgctcaaaaaaccatggaaaacacgcgaacaataggctgtgccttaacatcttgcaccttacccgctgttggacatcctacctttgaaatagctgacgatgaaatggaaatgggaatggggatccacggtgaaccaggaatttggcgcgataaattacgtagtgcagatgatattgcagaagaaatgtttcaacgtttacaaaccgaattatcactaaaaaagggtgataaagtctcagtactagtcaattcgttaggtgcaacgcctttagaagaactctatattttatataataaagttgttcaacttattgataatacaggggcgactatcattcacccattagtcggccgttatgcaacatcaatggaaatgaccggtgctagcttaactttttgtaaacttgatgatgagcttgaagctttattgaatgcacctgcacactgtgcattttggagagtgtgatgatgactaatattacactcgataatataaaacttgcagtacaacgtatcgcaattgcctgtgaacagtctcaaaatagactatgtgaagcagatagccaacttggtgacggtgatttaggggtaaccatgcaaaaaggatggcgacaaattgctaacgatgcccaagattggcctgacgatttaagcaaagcgctttttcaatgcagcaaatcattacaaaaagcctgtgcgtcttcttttggtactttgcaagcaacggcttttatggcaatggccaaatattgcaaagaaaaccacctgcaagaaatagcgcttactgatatttccccactattgacggtcgcataccaaagcatgatggcgagaggaaaaggggaattagggcaaaagtcagtattagatattctttatcatttatctgaagatctagcgtcaatctcatctctgactgaactaaaacccaccgctttaaaaagtattaataatacgctaaatgaatttcgccctaagcctaatttattgggacgtgcccgtatgttcccagaaaaatcgataggattagacgatcccggaatgttagcgattaacgttattgttgaagcaatttgattgaataaataaaaggctcttacatgaaaaaattatttggcgttacagtggcgatggttactccgtttgattcaaatgatcatgtggacatcaacgcgttgtctgcattaactaatatgttgatcactaaaggtgttgattgcctttatccttgtggcacgaccggagaaatgttgcgtttatctgcatcagagcgtaaaagtgtggcacaaaccgtagtagagacggcaaataaacgtttacctgtttttattcatgttggcgcaatgacggtaacagaaaccattgaactcgccaaacatgctgtagaaattggtgccgatggtattggtgtagtgacgccacaattttttgctgccacagacagagaattagagcactattttgtgactatcgccaatagcgtaccagagaatttcccaatctatctttataacattccacaatgtgcggctaataatatcaagcctgaattagcggctaaaattcagcaacaatgcaaaaatgtgattggtataaaatacagttttgccgataacaatacgacacttggctatttagcggttacagataatttttcagtacttcatggctacgataaattattccttggtttattagatgcaggctgtgatggcacagtttcaggatgtgcctgtgttttccctgagccatttgtgaatatgtatcaagcctatattacgggtaattatcaagaagcgaagcactggcaacaattttgtgtgaaatttagtgatgctttgaaatcaggcgcgaacatggcgatatttaagtcagcattaactatgcgtggcttaaatggtggtcatatgcgtttacctcaacttgatttattacctgaagaaaaccaacaattgaaagaagatctaacgcaattatgcaaagaagcggggatcgctttttcaattaattaacagagactcagcttcaaaatatctttattatattaagcagtataaaaaacaagctatactgcttttttataataaataacatctatttattcaattatttttgtgataaaaaatgaccatattgcataatatcgacattgccaccactgataataatgccaatttttttgccttttaacttatcaccaaattgacgagctgcagctaaacttaaacagcctgtaggctctacaatgattttcattctctgagcataaaattgcatagcagaaattagttcttcatctgttgctgttaaaatatcgtctacgttgttgcgaatgatctcaaaagtataatcgcctaaatgctgagtttgtgcgccatctgcaatagtttttggcgtatcaatataaattatctcacctttgcgtaatgattgttgtccgtcatttcccgctaaaggctcaacaccaaaaattctacaatgtggcgaaagggctttggttgataataatgaacctgaaagtaaaccacctccccctaagggaacaaacagcatatctaactcaccaacttcctcgaataactctttagctgcagtaccttgaccggcaataacgtgaggatgatcgtaaggtggtattaaagttaatccttcttcttgagcaagtttttgtcctatctcttcgcgatcttgtgtataacggttatatagaatgactctaccaccataaccttttgttgcttgcatcttagcggtgggggcatcttcaggcatgataattgtagctggaatacctaataattttgccgatagtgcaatagcttgagcatgattacctgatgaaaaagttatcacaccatttttgcgttgttcgcccgtaaattgtgataatgcattcattgctccgcgaaatttaaaagcgcctatgcgctgaaagttttcgcatttaaaatagaattgagcacccgttaactcattaatagtgcgagaggttaagataggtgttttattaagatatggcaaaatacgttgatgtgcttcaaccacatctgggtaagtaggaagcgctaatttattcataaagtttgctccttgatcaccatggcttcaatttcaattttactgccaaaatgaagctcttttacgcccgcgactaatctggccggtttatgctcaccaatccattttgcatataactcattgacaacaggccattcgttaatgtctgtaatatacatcttaacttgggcaatatcggttttttgtgcttttattcctataaggcaagcgtttaaattttcaagcacttgattaatttgaaattcaataggtttatccgttaatggcacgccgtttttatctaaaggtaataggcctgaaataaaggacatattattggctgtaacaacatgagagtagtgaccccctggcgatgtaagagcttcaatattttgcatcacaagatgtgaactcatagtattttcctatttcactctggttagattaaatgtataacaacttatacattatgtctaactctagatcaatagtgtagttttagctagtaaatcaaataataaatacgaggaaattgacgatagctatgatagctatatagaaagtagttattagcaaggtaaaattaatcgccactgtttggagggaaagtaatggcttaatggtgttattttaacatagataacatagcattagcatttgctttgtcgtaggccttttaaaggttgaaagaaggttcaataacttgattgagccttcttaatgtatgcggttattcgttaataaagcttaaatagttaaaaagtggcttaaaaccaaatttacgatatagcgctagaccatccgctgacgcatctaagaaacaacgctcgacaccttgctctcgacaaaactctaatacgtgagtaattaaatgtgtggcataaccattgccttgataggcaatatccgtcccaatatcgtcaaatcttgctagtttatcatgtaatgtcagcgttaatgatgatacaggctgccctgcaactaataatgcataatgaaggatcgtcgcaccattatctaacgctttttggtgataacgaatatattcattagttatcgtatcgtcaccaacaggaaaggcggttttcaatggttgcgcccactgtttaagatcatggttagttaaaataatatcgcacgggttatttttataggggggataagtcgcatcagacaatgagagatacatagcggttgtcataccgtcacccgtataacctgctttttttattatctcttcaaattcaggcaacagagattccggcagaaccagcatgtgaccttttttttgcgaggagaacagcgtacttgcttgttggaaagtattttcgctagcgccttgacgaagatagataaaattaaaaataggcgcgtccatcggtgtcataaagcagtgggtatgatcaccaatacgaatattgttttcacatatctctgaccaaaacgctttttctataattttaaactctttatacagttgtgcatccataatagttctctagataaatcatgataagcgataagaggctaacagaggatccgcttgtgtagattaatttggttcaacttactcacctaataaaagtgacagtgtcaccaatgtgtctgttgctacatgtaaatcttttagcaaatagggcatcgggctataatcgatgttccatctttagtagtcgttgctgagcaattatagcctttttatcatacgttttccggtatcactaaagttaccataaaaagtcatcttagtggcttagcatttgctcagggtgatgtatatcactaatttcaatgtaatatgtgtaagattacgttatcggtaatctacaatagggatagatctactaaagaataatcactttggtaaatccttgtgaatattatactcactttatgtgctaaaaaatgcaaaatttataaaaaataattatttttcataaagatatatagttatttctatataaaaaatagcttataactatgactctcatcacaaaaagataaatagactataacatcgcggatacaataggttgttcctcccataaatagctaaaaaaccagccaataattcttatttaaatgctttattaagaattttatctatataaaaaaagcaatttcagcaccatactattacctgcattcaaaccagtcatataatccaaatataaataaaaaaatgaatcattagactatatttaagctctaaaaccagtttaatttacttatttatcgttaaatataagtttattgttttacaaaaaaattaatatcgatatgatagcccacatatacagcatattatttttttaaaaaaggcgtcatatgttagaaagtattggtatttcaaatatttggacataccttttaggcgttatttttattacactagtaccaggtccaaattcaattttcgtcctaacttcgagtgcgaagcatggcgtaaaaggggggtataaagccgctcttggtgtttttacgggtgatgcattattaatctttttggcatttttgggggttgcttcattagtcaagacttcacccgttttctttattgtgatcaagtatgccggtgcactttatttaacctatttaggtttaaaaacactctatgcgacattccataagaaaaaagagcagccggaacaggttgcagtagaggttgtaaaagcgaaaaacggcttatatatcaaagcgcttttcttaagtttgttaaatccaaaaatgatcatcttttatgtgtcattttttattcaatttattgatcctaaatatgaaaatgcaggggttcccttttttgtattaggtgtaatattagaaatatgtagcatgctttacttatctgtacttatttttggtggcgttgctattactaataaagttaagcataacaaacgattagcatcattatcgaatagttgcattggtgctttgttcttattatttggtgccaaactcgctttaacggcttaatagattgatgagattgatgaaaaggtcacattttatggtgaccttttttttatacgaaatttgtatatgatgaagaatgagctaaatgataacaaggccaccttatgaaaaataccattgtaaaagatctgaaaacactggaagagatttatggtcaacctgccgaaccatcggtcttaaaagaagtggattttattcaccccctttatcgcccttatattgaagctacaccatttgttgcattagccacttatagtgctgatggtatggatgtttctcctcgtggcgatgagccaggttttattcatattgaagacgatcatactttattattacccgatagacgtggtaataaccgcattgatagcatgcgcaatttgttaattaatcccgcgattgctttattagtgctagtccccggcattaatgaaacattacgaattaatggtcatgcggaaattttaatagatgaagaaacactcgcacgctttaaatataacaatgcactacctcgctctgtcttgcgcatccatgttgagcgcgtatttttccaatgtggtagggcacttattcgttcaggtttgtgggaaaacaaatatttagctgataaatcaactattccagcaccgggacaaatattgaaatccatttctcatcaacaatttgatggtgataaatatgatgcacaattgcctgaacgtattatgaaaacattatattaatcatatagtttgctctttttatattaacatttgctaaaaagagcaagaaacagagtgcataatggggggaagtgcacgctatactgttttaataaataccttaattagtagcgtgattttatgtattttcagtatggtgaaaaagagatctcttttttaaaacaaaaagataagcgtctagccgcggtgatggaaagaataggggaaattaaacgtccacttacccctgatttatttacagcattaattaaaaatattattgaacagcaaatttctgttgcggctgccaccacggttcagcaacgtttacttaccctatgtgatggtatttatactcctgtacatattgctagtttatcagtgcaagatattcagcaatgtggaatgacaatgcgtaaagccggttatattaaaggtatcgcagactcagttataaatcatacgttagatttagaccaaatccccgctatgtctgataaagcggtgatcaataccctaataaaattaaaaggtattggcatttggaccgctgaaatgttattaatttcatcacttaatcgtcctgatattttaagttggggggatttagctattcagcgtggtatcatgcgtttatatcgccatcaaagcttagatagaacacgctttgaacgctatcgtaaacgttattctccttatggttcaacggcttcactctatttatgggcattatctaaagaaagcgcagactaaagagcaataatcggagtgatctaaatagaagtttattgataatggacttcatccagcatacataaatgtaggaactaaaatggaaaagagacattatcaacttattgaacaagcctgccgttttattgaagaaaatcagggtgatgtttctcttgccgacatcgccgcacatattcaatccagcccatattatttccatcgacgatttaaatctataatgggaattacacctaaagagtatgcgaatgcttatcggcacaaactaattaagaaagcattagctggcgataaaacaattacagatgcgatatatcaatcaggctttaatgcgaatagccgattttatgaaaatgcgacagccatattaggtatgacgccaacccattggcgcaatggtggacaaaatatcgtgattttttttgctgtagggatctgctcattaggccatatccttgtagctcaaagtgaaaagggcatttgtgcgataacacttggcgatgatcctgcgtgtttattagaagaattacaaaaacaatttcctcaagctgaacttgttggtgcaaaccaagagtttgaaaaattggttgcccaagtcattggttttgttgaactgccaacacaacctttggcattaccacttgatattcaaggaacagtatttcaacaaaaagtttggcgggcattattagatattccttttggttgtaccatgacatatcaagaaattgctcaaaaaattggttcgccaaaatcttatcgagcagtggcgaatgcctgtgcatcaaataaactagcagtggcgatcccttgccatcgagttatcagacaaaatggtgaaatatctggatatcgttgggggattgagcgcaaagaaaaattattacaaagagaaaaatcccttcatcatcagcatgatagattggctattagcaagagcgattaaccgttataataaacataatatcaatttataacagatgaaataaaatggcatcaacagcgattgtaccaacagatattacattttttgagcgtttaatcccttcaattttagccggtattaaagtgatcacaattagggatgaagcagaaagccactataaaccaaacactattgttgatttattatctaatgaacatggcacttattatggaaagttacaaattatttctgtatcacccttaaattttaatgagataaatgaatttcatgctcaacaagagggtatgaatttgcctactttaaaggccttaattaaagacatttatcctacaacggaaaatctttatttaatagaatataaattaatacaataagtagttctctcttattagttaataccaataaaagcggaggggttcctccgctttgtattataacttaaaatcaatagggtaatcgttagaaaaattaagctaaatcaagttgctgctttaagatctctatttctgcttgccattgagcctgtaatataggcttttgatgagcagattttcttgctaaatcagcattcaatttatcttcaagtgctatcaatttcattagcaattcatcttcattatgatgttttactatttcaacagatggagcatgatggccattttgctcattagagaccaatgacatatcttgttgagaaataagctgataaattgtttcaatatcatgatgttcgctaagaataccattgtgaatataccaaaaacgattacagcttttctctatcaattctctatcatggctgacgagtaaaattccccctgaaaattgttgaatttgctcagctaatgcctgtttaccttccatatcaagatggtttgttggttcatctagcattaataatgaatattttgccaaactgagaccaataaaaagtaaacgagctcgttcaccaccacttaatgactttacttgctgattatggcgagaataaacaaaacctgcatttattaatgccattttcctttgctcatctaatagcggtgcaaagggctttagtgcatcggcaagggtatcattatcattaagttgtgcgagactttgatcgtaataacctaactcaactctgggatgcagcctgatcacattttctgttgatgtggttgaaccatgaaatgatgaccaaatcatttttaataatgatgacttacctgtcccattagcaccaacaatagcgactcgatcaccacttttgatccgttgattatcgatggtatataaaatcggtgcatctggcgcagggatcactgaaagctgatgcagctcaagcaatctatctgcccgtaatattgttcctgataactgtaacgtccattgattgccttctgttacatcgacttgttcgtcttttaaacgaacaatttgtttttccatttgtttggctttacgtgacaaactttcgttatcatacacttttccccagatggccaattgcttcgcactttgtgcaatacgatctatctctttttgttgtgcatcacaacgatgttgcgcactgatatcttgtgcttcttgctcttgtcttgcctgagagcagggcaagcgaaaaacagatagggttttatcacgaatgatccacgtacaattggtcactttatctaacaacctattgtcatgtgaaaccagaataaaacttcctcgccactgtgttaaaaatgtttctaaccacaagatagtcggtagatctaagtggttacttggctcatctaatagcagtaagtctggttgcaaaatcaatgctctcgcaagtaataaacgagtatgttgaccaccacttaattgtgagactaatagattgatttcattggttttaaatcccatttcacttaataataattcactgcgccaactttcagatatgcgtagctcttcaggtaatttatgaagaaccgcatcaatgagacgcattgactgtagctcacttggtaactgttgttcgacataagccataatgacttgattggcgatagtaatagagccatctgttggtattaattggtgtgataaaagttttaatagtgtactttttccacaaccgttgtagccaattaaaccaattttctcacctttagtgagggccaaagaaatattactcagcaatataccgtgattattatgaaaagagagattttgtgtagataataatgtgctcatagcttactcattttttaagcataaaaatgctttgggtaatatcacgcgataacccagtaagctgaggagaggtaatagttaacgtcgctcaggcaggttaacgcagtaaagaactgtgaaagcctgagctatggcgattaccaaagaagtgtgagtattcaataagatcacacaacaacataattagcctccttttaaaatttatcagttaatcggtaaagtgagtttagcaagacaggtttattgattgcaagaatgcaatgatgagaaaccgtgtctttttgtgtgaaagaggagggaataggcgttgctgaattaatatcaaaaatagttattttttgcacactaaatcatagaatttcatcattttatcgtaaattttcctagataagaactatctccctacattgcgtgtttttatcatgatatattgctatttattcgctatagctgtcctataaaaggttagaaaatgagtaaattaagagtcgctattatttttggtggaaaatcaaccgagcaccaagtttcattacaatcagcaaaaaatattatcaatgaattagatcgaacgaaattcgacctttgtttaattgggattaatgaacaagggcaatggcatgaatatgctgaagacaattatttaattaatagcgataacccctcaactatctcattaagccaacctttgcgtccagtggctattattcctggcagtacccgtcagcaatttatctctttaactgatgggcaacctcttgcacaaatagatgttgtatttcctattgtgcatggtgcttatggtgaagatggcaccctacaaggactattacatatgattgatatgccatatgtaggccctaatatcatgagttctgccgcatgtatggataaagatatcactaagcgcttactggatgatgcaggattagcggttgcaccatttattacactgatggctcaccaattaaatgatatttcctataatgaagttgttgaacaattagggctccctttatttattaaaccagcaaatttaggttcttctgttggtatcagcaaagtcaataatgaagccgagtttaatgctgccttatccatggcatttgaatatgatctaaaagtgattatcgaaagtgctattgttggccgtgaaatagagtgtgccgttttaggtaatgaagagcctgaagttagcccttgtggtgaaattgttttaaatgatgctttttatgcttataacacaaaatacattgatgatgatggtgcaaaagtagtagtacctgctgatttagataatgcgattagcttacatattcgccaaacggcattgaaagcttaccaagttttaaactgtttaggtatgtcgcgcgttgatgtgtttttaactgaagataatcaagtcattatcaacgaaattaatactttaccaggtttcactaatatcagtatgtatcctaaactgtggcaaagtacgggattagattatcaatcactcatcacgaaattaattgaattagcgctagagcatcataaaaaaacagccgtattaaaaactaagtgtgagctttaatcacaataatactctaatagcgaagtgaggttcagatgaaaattacacaccttgatcatttagtattaaccgtggctgatatcgaggcgagttgtcatttttatcataatgtattgggttttgagataattacctttaaacaagggcgtaaagcccttgcttttggtcatcaaaaaatcaatcttcatcagctaggaaaagagtttttgcctaaagctgctaaaccaacggcaggctctgcggatttatgttttattactgaaacgccattgttagacgtgatagagcatataaagcagcagggtatcaatatagaagagggtcctgtaccaagaacaggggctacagggcctattatgtcagtttacttacgtgatccagataataacttattggaaattgctaatattattgaatagattaaccacatattctaaataaaatataataatatttagctaaaaagctataagtgttctttttagcttaaagattttaaattatttatattaaaaaaatgaaccctccaaatatgatagtaataaatagacctatttgtggctattttcgcctgattaaaataaaaattaatagatataatttaatgatatagcctttcttattataataatgttagcattattcaattatttttcaggtaacaatggatggtatgatgaaaaaagttatttttgtaagtgcaatatcaggggggatcttattttggtcaatacatttacaagcggataattttgattgtcgtaatgcggaaacacaaacagaaattaaccaatgtgcataccaagattttcaacaaaaagatgaagagctgtcacaaatttatcaacaatattatgtgaaattagaaactaaacgacaacaacagttacagcatgcacagtcagtttggatgacatttcgtgacctctcatgtcaatatgaggcagactattaccaaggtggcagtttggctccgatggtttacagtagctgcttaaaagataaaaccatagaaagaattaatgatctgaaaaactatattgccttatattaagactaaagaacttcttatcttgaaaataggctactcattttaaaagtattgttttttatcaaaatctatcgtttttagttatataaaattattatttttgtattattttgaaacattaaataacttgactaatcccacctgtaaagtactctaaattataaagtagcaattaaaaatagaagatatgatatgaatataatgacgaaattaggcgcagcagtattgcttacatccttatccactattgctatttctgcagatataaaactaacatacggtattaatttgattgattttaacggtgatggtgtaaaagatatagtcgttaaatctaagcgtatattaaatgatgcatcatcaattaatatggtcacggtttatataaaagatgcagatgaacaagtttatattgtaccttcaatttatgataatgctcttagcttatttgataataaagctgaaaacagcaatattaaaatctctaatttcaaatttatagagaaaaaaaatcaagtgatcttagtgagcggtgagaaaataggtaatgatatgttacaatcaacacctatacgtttttcaagttacactatcacgaaacaagataaacaatataaatgggcattttctgcatattgcgtaaccaattctacttatcttaatgttgatgatgcttttgttgatccctgcataaataaattaattcgaaattgatacacgcgtaggttgtaaatacgttgactttattgaattatttttatctttaatatcaattaattatcttattccctctcatatacctctctttatatagtacgatcacttgtatcatttggcattccttgttattaatctacacttaggatatttcttaatcatcaatatgctgataattttgtgtttgtcatgttccgtttttaagagggagttatgaaggaaattattacaggtttgcttctagcctcaataagcttattttctgtctcttgttcgcaagaagatacagatgtcgtcaaagtagcaatcaatactggaccagaccaagtcatttgggatgaagtgatccgtttagctaaacttaccgaaggattaaatgttgaagttattgcatttaacgactatgaacgtcctaataaagccctagaaaatagagaagtagacgtaaatgtatttcaatctattccttatttacaatcagagataaaagcccacaattacaaatttcatattgccagcaaaacgtacatcttcccgttagcagcgtattctaagaaaataagcgatattagcgaactcgaatatggtgatgtggttgccatccctaatgaagcaagtatgaaagggcgagctttattattacttgcagaaaatcacctcatttctttaaaagagggggttggttttttaccttccgttgaagacattattgataatcctaatgccttgatatttcatgaagttgaaactcccatgttagttgaagcccttgatgatcctgaggttacgatggcggttatcaacaataatttttcctctcaaattggcttacttgctacccgcgacggtttaattatggagaataaacattcgccttatgccaatgttgttgttactcgtatagataatatgaatgatgaaaaaataaagaaattaattactgttttacattcaagacaagtcgaattaaaggtgcaagaaatgtataaaggggacgcggttaaggcgtggtagaacatatttcaggttaaaaaacaaacagttcaatataactatgagtttctatacctaataaaacaatctaacaatatgaagttttttcagtatgatgatagaaactttataattcataaatagtagaaataaaaaatgtctagttctcaactgaaaaaacaatatattggcgaacatcaattatctccagaaacgctaatgatgagctatggatacgatccattgttatcggaaggctctgtcaaacctcctgtatttttaacatcgacatttatttttaaaagtgcagaagaagggaaaaatttttttgatacggtaagtggaagaaaaccccttccagaaggagaaaaagcaggtttagtctattctcgttttaaccaacctaatagtgagatcgttgaggatagattagcagtttatgaaaacacagcatcatgtgtcctcttttcatcaggaatgtcagctattacaacgacattaatggcttttacacaacctggcgatgttattttacattctcaaccactttatggtggaacagaaacattaatagccaaaacattcgctaagttcggtattcaagcaacaccatttacagatggtttaaatttagcacatatccaatcgcaagctgaaatagctagccaaaaagggagagtcgcggtgatatttgccgaaactcctgccaatccaactaattcactggttgatattcaagcgttaaaaatcgttgcggataaattagaaacaagccaaggctatcgacctattattatttgcgataacaccttattaggacctgtttatcaacatcctatagagcaaggcgctgatatttcactctattcattaacaaaatatgtgggtggacattctgatttagtcgccggtgctgcaatgggatcacgcgagcttattaatcaagttcgcctattaagaggtgcaatagggacacaacttgatgcgcattcttgctggatgttaggccgctctttagaaacattgcaaattcgcatggaaaaagccaatcaaaatgcgctattagttgcacaatttctacgtgaccatgaaaaagtgaaagtgatccactatttaccttttgtagatgaaaatagtattgaaggtcaagtatttgctagacaatgcacaggcgcgggatcaacattctcctttgatattgttggtggtgaagcagaagcttttcgttttctcaatgcgatgaaaatatttaaattagcggtgagtttgggaggaaccgagtcattggcatgtcatcctggctctaccacacattcaggtgttcctatggaattacgccacaatataggtattcaagaaacaaccattcgtttatctattggtattgaaaatccttatgatcttattgctgacttatctcaagcattagatcatgtttaatggataaacaatagcaaaacaacggattataagatttataatccgttgttttttttgctttgctgttttttattgttgtttttgccattcacttttggttaaacgacaaataacttctgttcttatttcgtctaaatactccacatactgatctttaattatgtgatgatatttaaatccacacttttcttgtactcgcttcgagtttacattgtctgcaaaataaccacaccatagattatctaattgtagagtctcaaagctatgacaaataagcgctttcactgcttcaggaataagtcctttcccccaaaaaggagtaccaatccaataagaaatttcggcatcattatcccctatagggaaattgctctcatggcaaaaagataagccaattaaaccaatcgctttatcatcatcgagcaatgtgacagcataaacttcatcacgcataaatatagcctggataatttcggtactttcagcaacacttttatgtgctggccagccagcgatagggcctactcgcttatccctcgcataataatagaggctctctgcatctgatattcgccatggacgtaataataatcgttctgtttgtaattttttcatacaatttagctctgttataacttatgtttcattatgttaggatgatcgtattttaaagagagccaatataaaactgaatggattaattaaggtgttatcggtacttttgacaactaaatccattaatgctcttgtgattaacattgagatcattaaaaataaaaacagtagcaatatgcaatagagtgaataatttatgtttagtcaatcattattaaagttaaatatcccttcggagtatgccgttattggtgaaagcgatatgcataatgaattaggctatccattagcattatcttatgttgtggttattatttgtttagatggcagggctgttattaatatagattttcaaacaaaaaccattaaagcgaatgatatagtgatactcggtgatgatagaatggtcacattgcaacgtaaatcagctaattttcgtattttttattgttttcttaagaaatcttttgcctctgagatcgcttatgcactttcaaatagtttgtttacatttttgcatgaaaaccccatttgtcgcccttcaacggctcacttaaacgccataaacaattgggtggaacaattaaaatatatagataaaagttatactgatcatagaaagttaatgttgagagggcagttacaaaatcttttttttgcgataacagaattaataccatctcattattccttatctaaaaaagaattcagccgtaaagagcacttatgttggcaattttgggagttagttataaaacatagccaccagcacagagacgttgcctattatgcaaatcgccttagcatcacaccgttttatctatcacagctcactaaacaatattttaatgatgttcctaagacgctgattaataggcaagtaattcttaaaataaaagcgttattgacgcacactacgctatcagtaaatgagatcgccataaaactccattttgacgatccctcatatctatgccgttattttaagcgcgagactgattgttccttatctggatatcgccaacaatatcaacggcaataaaatatattaagcagctattcttttttcactgtagttcataccttgcagcatacaaagccaagctagtactgcgatccccattaaaatagcgaataacgaaatagggggcaaggttgtcaggatataaccactagcaagtggatttaatgcagcacctaaccaacctaaagattgtgcagagaaataacttgctttcattcctaacggcgcaatattatcgatcatcatatactcaccaggtgcataaatcagttcaccaaaggtaaatattgctatcgccattgcccagaaaattaaattatcacccgccagcataaagcccgctaatcctaagataaaaaagagtgtgcctaaggtcattaatttacgtagtctttcagcaaccacttgtttaccgacgatatattgtaatgagacgacaatggccgcattgacggggaggatcaccgcaatagcagattcagccaatttagcatcataaacaactaaaaggtattgcgaaatacacgaagcaaatgtaccaaaagttaatgtgccaaaaaaagttgaaagcacaaaccagcctaatgctttatcttttagcattattttcggatcccactttacactattttcttctgtggaatgctctaccactgaacgttgcacaaaacattggatcataaataaaggaatactggcggatattgccgctaaccaaaaaggtaattgggtaccatacattaataataatgtgccaataggtgggccaaccgtccatccgatattaataaaagtatagtttagtgaaaatattttaggctttgctgatattgataaagtttcagaaaaataagctttcaataccgtagaaaagactaaataggaacagttaataattgagaaaaagataaccactaaaatagtactattgaccattgggatagcagaaaatgcgataataaaggtaataatagaaaaaaccatataacgttttttttcaaatttatctgccagcataccaaaggcaaggctaaatactatccccgtagtcagtgaaatagacattgcgataccaatatcatcaacaggcaatttatattgtcgtgataagtatatcgccataaaaggcagtgttgcacctcttcctatagtcagaataagtgatgaaaagagtagtgcagttgtagaacgagatttttttgagaacatattatcattttaattatttgtattaatggattattgttgtgtttggtgattttctggtgaaaactgtccagctgtatatttatacataacttataaataactgtatagagataaaagctagaaaataaatttttttaaccactacctattttattatcccatttttgataacactgtttatcaaaaatatctctataacaataagttagttttctctagactaaatagtttgatataacccgatttagctaagaggcaaattatgtctattattcatcttgaatttgaaaagcctattgttgaattagacgagaaaatagatgcattacttgcatttaaacagtctcaagatgaaacaacggcagttgatatagacgaagaaatcgccaaacttcgccaaaaaagcctttcattaacacgctctatattttctgatttaggggattgggagatagtacagttagcacgtcatcctatgcgcccttatacattagattatatcaaagctatttttactgatttccaagagttggccggcgatcgtgcttatgctgatgataaagcgattgttgcagggttagcgcgtttagatagaaaaccagtgatgattatcggtcaacaaaaagggcgagacactaaagagaaagtaaaaagaaactttggtatgccatcaccagaaggttatcggaaagcattacgcctgatgaaaatggctgaacgcttccatttaccagtgattatttttattgactccgcgggtgcttatccgggggttggtgctgaagagcgggggcaatcagaagccatagcacgaaatattcttgaaatgtcccgattaaaaacaccgataatttgtacaataacaggggaaggtttttctggtggtgcattagcaataggtgtgggggatcgagtaaatatgttgcaatatagtacttatgctgccatatcgcccgaaggctgtgcctctattttatggaaaaatgctgataaagcacctattgccgcccaaaccatgggaatgacggcacctaaattacaggcattgggtattatagactcaattattcctgaaccattgggaggcgcacatcgccactaccagcaagtggctgaatttgtaaaaaaacagcttctcgcagatttaacagaattgaatagttattctaaagaaaaactgcttgaaaaacgttatcaaaaattaatgtcctatggttattgttaattcttttcaagtgagagagcaatcaatgttacactgcctatattcaatactccccatataggcagtatttttatgtcaattgaccttaatttattacgtattttttctgcggttgcagagcaagcacagtttgccagtgctgcacgatcgctttctatgccaacatctaatgtcagcagggcaataaaacagctagaacaacagcttaactgccgattaattgatagaaccacgcgaaaaatgcgtttaactgagcaagggaaaatcttgtatcagcaagccaaaaagaccttatatgaattagataatgttgtagaacatataacgagtgatggcccattaacaggaacctttagacttacgatacccagtgaatatggtagtgagttacttgccgatattttagcggattttgctgcacttcatcctaacttaaccattcaatgtgatacgcagctaatgccaagaaatgttatagaagatgatattgatttacttctaacatttcatcgtggccaattagccgatagtagctaccattcacgtctcataaagtcgtggcgtagtattgttgttgcctcagagagcttattagcaaaaacgggtatccctacagatattgaacaactaagccaattaccttgtatttccagtttaagtgcattagaagggcaaccgtggatctttattgataaagagcagaaccctgtaaaagtgacaattaatagctgttatcgtgtaaatagtgctatcttagccaaagctgccgtattaaaaggtttaggttttgctattttagctgaacattgttgccttgatgcgataaaggcaggcaaattgcgagctatttcttttcctcaacagcccgcatcaattagtttagtcgcgatatatgcaagtcgtcgttcgctttcacgtaatattgaacattttcttgcatttttaactcagcgtttataataattaatccgctatctgctgagaaagtgcaccttgtttctctttgcaaggaaaaagcataataaacagagtaataaaacaggaaagccctgcggttagcatggcataggcaaatcctgaattaaatgcttcaggtaatagggcaaccaactgattatctagggaagcggttttattttctgttactaacgtaataatattaatcggttctgccactattcctaatgcttgactttgtatcatcatataattaattgcttgctgtatcattaatgtacctaataacgcaattcccattgtcataccggtttgtcttaatgcattcatggttgcagacgccatgcccgagcgggacggtgctacacttttcatcactaaaacccctattgcgggtgtcgctaatcccattcctgcacctaagataaataaatagcttcctgttattgtgtaagagctatttgttgctaatgttgccaataaacaagaagatattgcaatcaacaaaaagccaaagatcattaattttctgacagatatataacgagagaaccgtccaaataacatagaaaaaagagccatggcgataaactcaggagccattcttaaacctgtttctaatgcactccagccttgtgctttttgtaggaaaaaagcgataaaaaagacattactataagtggcaaatcccaaagtaaaagaggaaaggttatattggaaaaacgagcgatctttaaataacgatagcggtaataacgggcgttcaatacgtttttcgactataacaaacagggtaataaaaatcagaccgacaattaatgcgaatacagtacgataatcagaccaacctacagagccagcttcaataaaaccataggttagtaaacctaatcccaagatactggttaattgtcctaggggatctaacgcaacatcctcaggatcggcactttcacttaatccataccagcctagtaatactgtaatagcaccaataggaatattaataagaaatatacttgcccaaccactggcatgaactaatgcaccaccaaggatagggccaataatcagtgataatgcactaaccgaagaccaaataccaataatacggatacgttcaatatcaacaggaaaggcatgtgtaataagtgataatgcgccaggaataagggctgcagctgcaataccttgaataatacgcccaaggattaatatttcatgttgttgtgcaatagcacagataagggagcctagagtgaaaataatcaccccccagagccacactttttttcgtccgaaacgatcacttaatggcccggaagacaaaatacaagctgatagacatagtgcataagcatccacaatccactgtaatgtagccatattggcattaatatcattctgaatagtaggtagagcaacattgacgatactaatatcaagagtggccataaatgtgcctaaacagatagcacaaataagtgacaaccgttttgtataactcataagttttattacctttatggtgaaataatagtagtatcataatatccgactgaccgtcggtcaatcaattgatgataataagtttcatttacggttattgtggctattctcaatatggagtaccctttaacagccacttagagggagatgagcaatgtcattagaagaaaaaaatatcgataaaccaagaacaaagccagccgaagttcgtttagaagagttaatgaacgccgcagaaacactatttcttgaaaaaggatttgatgccacaaccgtcagcgatattgtaaaacaagcgggggtcgctaaaggaacgtattatcactattttacggcaaaaacagatattctcgacgcactgcgaactcgatatatggattggtatattgataaagttgagcaagcaatggcaagctgccaaattcaagattttcgcgctaaattaaaacagtggtgtgaaactagcgttattgcttatgttgaaaaacaagaattacacgatatgctttttcatcaagtctttcatcaaagcggtaatattcatgaaaatagagcgctacagcagttacaaaagatattaatgggggggacagagaataaaacgtggcaagtcctacagcctgaattaacctgcacgcttatttatcatggtatgcatgctgccgttgataatttagaacacagtacggaatacacatcacaaacattaggtgcgctattatatcgacaatttacacaattattaagttaaccagactattaaataatgaatattcgggttgttgatataaaataagcgtgacactgtcacaaaaaagaaaattgggcgcgattaacaaccgaaatcatttgtggtgtttctaatattgttgcatcacttttatacggttgtctgtttcttagcaacataaccataaggtaggacttcaaaagagcaacatgataatttcatcaaaaatgaaaggggattatgattgactcgtggttggtaacatacaacaacagaatgttaaatttcaaacaaaaaaacatgtattaatctttatatatttaaataccacatgaaattaatattacctatatttttaatataatgatgtaattaaaagataaaataaaatattttcccaatataaataaagagaagcatttcaattaatatgtaattatcattaaggtgttatatgagtaaattaacaattggtggagtaaatatatcaacttcgcaaataaacaaattatcacacgcatctaaagctagagatgcaatgtctatttgggaaaaaataaaagactggtttaatcatggtcaaaaagaacatgtgcttaacttactttatcatacctatttcaatcctaaaaattcaatatttgataaggttgatagctttgcagaattatattctatgacaggggcgcaatataaagataattttcatttatatttaaaagatggttatgatttaaaaatgaaatttgttataaaaaacgtttataatggtgaggtatcattagataatttaattaaagacatgatagatcggatacataataaaaatccaagtataaaagaagatatagaaaatataagaagttatataaaaaaaagactgcatgaaattcctaatgaagccaattatgatattaatcaatacaatgtctatttatcccagataaaaaacgacttactaccaaataattattttaacgtagagcgttatttggatggtgtaacagattttgttcgtttatataatataaataattctagaattagtgtagacgataaaattgaagaccgttgtaaattacaaaaacttatgaatataatacagcatattgatatagaatatagaaaaaatattcaaataaaacttgtgaagaatactgttgctttaaatataaaagataaaaattcaaaagagtttttgaatttaattaaaatcgaattattgtcattgtacaatcctcatgtaggtataatagaaggatttataaaacatggaatggaaactttatttaaagatgaagacaaaaaagaaaaagcctgtggatcattaaggaaagctattattgattataactatccatttattagaacacttgaattcaatgttactgatgagactataaataatatttatataaataatatagtaccaagtgagtatatctccttccgccaataaaaaacgcccataattacaatgaattaagtgacaatagctacagctataactctatctttaaataaaataaaggcttggaacgtaaaataacaccaagccttttattttttatattaataaataagtggggtactaaccatcaatccctttcttagccaagaactcatcataagtgccttggaaattagtcactttttcaggcgtaatttcaataattcggttagccaatgagctgacaaattcacgatcgtgagaaacaaaaattaacgtcccttgatagagttctaacgccatattcagtgactcaatagattccatatctaagtggttggtaggttcatccataatcagaacgtttggtttttgcatcattaatttaccaaacagcattctgcctttttcaccaccagataatactttgactgattttttaatatcatcttgtgagaaaagaaggcgacccaatacactacgcaccgactgttcatcatcttctggcttcatccataaactcatccaatcgaaaacggtcatatcaacttcaaaatcagtggcatgatcttgtgcataataacctatagtggcattttcagaccatttaacgcgtccattatcaggcgttaattcacccactaatgttttgatcatggttgatttacccacaccattggtgcctaaaatcgccactttttcgcccacttccagcatcatatttacgtctttaaataaaggcgcatttgcttcataacctttagcaatattctctacttctaaggcattacggaataatttcttctcttgctcaaaacgaataaagggattttgtcggctagaagctttgacttcggttaattgaattttttcaatttgttttgcacgcgaagtagcttgacgagattttgatgcattagcactaaagcggctaacaaaggattgtaattcactaatttgtgcttttttctttgcattatcagcgagtaaacgttcacgcgcttgtgttgccgctaacatatactcatcataattacctgggtgaactgttagtccaccataatcaagatcggccatatgagtacacaccatatttaaaaaatggcggtcatgggaaatgatgatcatagtgctattacgttcatttaatgtttgttctagccagcggatcgtatcaatatctaagttattcgtcggttcatcaagtaataagatgtcaggatcagcgaatagggcttgtgcaaggagcacacgtagtttccatcctggcgccacttcactcattgggccattatgttgctcaagtggaataccaacgtttaataataattcaccggcacgtgattcaacggtgtaaccgtccatttcaccgaatttcacttcaagatcggcaacacgtaaaccatcttcttcgctcatttccggtaagctataaatacgttcacgctcttgtttaatttcccataactcagcgtgccccataattaccgtatcaagcacggtaaactcttcataagcaaactgatcttgttttagcttacccaaacgctcattaggatcaaggaatacgttaccgctagtaggcgcgagatcaccaccgagaattttcataaaggtggatttaccgctgccgttagcaccgattaaaccatagcgattaccgccaccaaacttaacagaaatgttttcaaacagtggcttcgaaccaaactgcatagtgatattattacttattaacaagacgaatactcatgattagtgaatgataaagataatggggcggcattatgccataaacttaccccattaagacagtagagtaaggttagccgatgacttattttacgatatcatgcacttttacgcgttaatcacttaacacttaactcaaaaagactatgtgatttacctgctttaataacgatatgagtgggaatgtgttattttaataggattaattttcaaaaagaaacaatcaaagagagttactatgccgatatgggttgatgctgatgcctgtcctaaagttattaaagagatactttatcgggcagcagatagagaaaaagtggtgatcacttttgtggcaaatcagcgattaagtatacccgcatcgccttatttgcgcacattgcaggtttctgcaggttttgatgtggctgataatgaaattgtacaacgtgcaaaccaagatgatttggtgatcactgccgatattcctttagcggctgaagtgatcgaaaaaggggctattgcactcaatcctcgaggtgaacgttatacagagtcaacaatccgcgaacgattaaatattcgtgattttatggatacgatgagagcaagtggcattcaaacaggaggaccagcaagtttatcacagcgcgaccggcaactttttgctaatgagttggataaatggttactacagcaaaaacgtaaaaaataataaattatcaataaaataataaacttttgaatattcttaccatccgagaggtagttatgtcatttactaaatcaatgcttgcactcgctgttatggcggtttcttttactagtcacgcagccaaacaggctgatttaatgattgtcgatggcacagtgttaacaatggacgcacaaaatcaggttatcgaacaaggaacggttgttgtaaaagaaaataaaattatcgccgttggggggcctgagttaacacaagaataccaagccaacaaagtgttagatgtggatggtgatatcgtgatgccaggattaattaatacccacacacatgcatcaatgacggtttttcgctctttagccgatgacgtgccagaccgattacatcgttatattttccctttagaaaataaaatggtgtctcgcgatatggttcgcgtgggagcaaacctcgccaatgttgaaatggtaaaagggggagtaactacctatgttgatatgtattattttgaagatgaagtcgctaaaacggttgataagatgggaaatagagccatcttaggtgaatcagtgattaattttccggtggctgatgcacaaacccctgaagaaggcattcaatatgctgtcaattttattaatgaatataaagatcacccgcgcattattcctgcctttgcacctcatgcaccttataccaataccacagagaatctgcaaaaaattgctaaactctcggtagagcttgatgcccctgtgatgatccatttagcagaaaccgatagagagaaagaagaaattgcaaaacgaaccgatggtaaaagcccagttcaatatatggcagatattggcgctttaaataataaagtcattgccgctcatgcgattatggttgatgagcaagatattgatttattaaaaaaatatgatgtaggtgtggctcataatattagtgctaataccaaatcagccaaaggtgtttcgcccgttgttgccatgctagaaaaaggtgttcgtgttggtttagggactgacgggccaatgtcgagcaatacactcacaacgatgaatgagttaaatttagtaggcaaaattcataaattagagaataaagatcgcgccgcaatgccaccattaaccgtcgttgaaatggcaacaataggctcagccaaggcattacatatggaagataaattaggctctttagaatcgggaaaacttgctgatattattgttgttgatactaaagcacctaatatggtgcctatgtatagcccatatgcagcattagtttatggtgcgaatggaagtaatgttcgtcataccattgtagatggtaaaattttgatggaagatcgccaactgttaaccgtagatgaacaagcgattatcagtgaagctcaaaattttgcgaataaagtacgccaaaccgttgttgatagtggtgaagttgttaaatagattgtagtaatatagcgttaataagtttataaaaggtgatttgatatcaaatcaccttttttattttaaactatcagatatcggaggtttgttggttaatactttttcttattgtatttcttagccatataatttttgtattatggctattacgcttatgccataataaaacaaaaggtagatgaagctggtctaaaaacacaggggggagagggataggtaatgttacaatatcaggaaaatgtgttttcacataataacgacaatatcctggtgcacaagtaattaattgatggtcaggttgagatatcataaaaagagattgctcaaaagaagtataagtaattgctatctgacgacttttgttcatttcttttaagatattatccaaagcccaatgactttgtttgtcatattctgtactcacctgagaaaacgataaaaaattattaagatcccacttcattttcattaacggatgatttttgtgtagataaacgagtgggatatcatcaaataatatttcataatcaatcacatcaggaagtagctctagtaactcttttgagcgtgaatagtattctcgtccaacaagcccaatatcaacttctccatcaataatattagaaagggaattatattcccaattttttatctgaagtgtggattttgggtaatgagataatatttgttgtggtaaagaaggtaacatgacctgatgtaacggtgtttctaaaactaaattaaatttaagtccaacaggaacttctgtattacgtttattggctatatggtggctaatattaataaaatcagataaagaatcttcaatacttaacgataatggtgttgggatcaacccttgtggactacggataaaaagaggatcatcaaaccatatccttaatttggctaatgctttactcacagcagaaggagaaatggataaccacttagcggccaaggtgacactgcgctcctgtaaaagaatttgaaatatgactaacaaattcaaatcaattctatgtaatggtttgttagacattatatttaacctttttttgttctgtgaaccgaggaaagcatagaaaaagagtacctacaatacaactgataaataaaataaccaccaacatatttattgaggatacttcaatccaccccattacccaaatataaagtgaagaaaaacttaattgtgaaatacccagcacagagctcgcaacgccggctcgttggctaaatggagaaagtgcttggctcataataatcccaaataatagcgcaaatcctgagccgcataatgcaaaggtaataaaaaaccaacgcatatcactctttttccctataaaaaggaaaataatacctattccaaaacatataagccctactgataaaatatgcttatagcgatatttcattaatatttttggcattaaaaaagaaatagtcatacttatcattgctaatgatgtcattaatattgaatactctcctgttgaataattcatttgttgcatcactacaataggagaaatattgacataagtaagaataacggccattcctaagcatgaaataagtaaacgacttaaaaaatagtgagtaagaaaagactctgttgttggttttattacagatagatttacttttttaattttaatttcttttttatggtaggtttcttttattcccaaaaaacaaaagataaaaaccaatagggaataagcccccataagatagaacatcattgaccattcgcaatataatagaataataaagcctagaacgggagctaataccggaataatacaagtaataccatttatcatagaaagtactttagcacgttgttgttctgttaatgtatctcttaatatcgcaaaagtaacaacgtaacaaaaacctgacccactaccttgaaaaaatcgtgaaatcaagaactgtttttccgttatcgaaagcccagcacttaatgacgctaagaaaaaaatcagagtaccaaataaaataacaggcttacgacctaaattgtcactgcaccatccagcaattaacatggatgacaccattcccatcaaataaattgaaaatgcatggtgcaatgtcacttcagaagcatttaaatcgctagcaattgctgttaatccagttaagtatagatcaacaccaagaggataaatcaatactaaaaaaaaactaaaaataacatatttagtcataaaccacctcgttttagaaagtggcattctagtaactaaaaaaaataaaacctaatgataaaagagcaatcgcttatttccataatggaaataagcatgcttttagtttttatatcctttattttctacttatctttagggatatatactaaaattcgatttattttttatcctattttcttgcgtgggaattaatggttagcaaaccattgttcaacttcttcatagctacccgtatagataattttatcttgttttttacttaactggtaacgatacataggatcgtaatattcttttagtaaaggcgataaccatgaaaaatgcacttctgtattcgcacttattttttgtgcggctaaagcattatcaagtaattgggttaactccgcggctctttgagcacctaatcgacgtcgaatagcatacaatccatgatgcaaataatcactgtattcttgccaacctttttcttcaccatacgcttcaataaagtcatgagtcatacgatcaaaatattcttctttgagtcttgccatacgccgctcaaatggatcatccaccacaaccaaatgggctgttgccatttgtatacgcaaactttccggtaaaccattagcaccaatagcacggccttcgtcttcgagtacccagcgggaatgataggaggatttttttaacatatcgacagcaaggtagttttcgaaagtcgcttgagcaaactgagcctcaacagtgcgaccaaatgaggagcctcgatgatgagcgaatccttctaaatcaattccctctggtaaagagcgtactaaggttgttttaccattacctgtacaaccaccaattaagataatagggcgttgtactagctcattggtcatttcgatcgtcgcttgtcttaacgctttatatccaccttcaattaaaggataatcgatgcctatttcagctaaccatttttgaacaatgtgtgaacgcataccgccacgagcacagcaaataaatccggaaggaaaacgctcgcaagcctcgcgccaagcagcaacacgatgtgcttttatctcgcctttaactaattgatgccccaactctaccgctttttgagagccatgttgtttgtagcaagtccctacagccgcacgctcttcattattcattaaaggtagatttattgcgttgggcatcgctccttgattgaattctattggcgcacgaacatcaataatcggtgtttcattggcaaggagtcggcgtatattttgagcagaaagcgttgattccataataaaaactataatatctaaacaggcagaaagattgtctactatactcttaaaattacctaatagcacacacagagcacgtttttgtgagtaataaaatcaaactctatttaaccagcactgcggcattattttgaaaagcgtatttaaaataaagaaaattgaattgatcataaataattcaactacaataaccttatgctatttttagcaaaataatataagtcactttattacaactaaaaatattatagtattgatagctatgaatggatttaatcataaaatgataggtgcattaccttgaacttaataaaaaaacatcatcgaattatcagcttaactgtgatgactgtattgttgacgggctgttcacaagggcattctccttttattcctatgctaggtgcttattttccctattggatgttatgtacatttattggcctattaggtgctttttgtctacgggttttacttatctactggggaattgatgataaattgccagtacctttgttattttattttgcgattatgttatcaatttctttaactatctccttactttattttacttattaaactatggataaaaaaattaaaaaaagcctagcacgcgtgatcaccattattgtttttttgataacgctcattttattatggcaaagtattcatatatcggcattaaatcctcttagtgaagatgccatcattgatgcaaataaaattaatatctcagcctcggtgcctggacgcattgctgctgtttatgtcaaagaaaatagtaaagtcaaaaaaggcgatttactgtttacacttgatcccacaatgtacgcactcagggtagagcaagcaaaagagcaactacagattgcacaagcgacattaagcaataagcaacgtattattattgcggaaacatccaattcagaagtggcacaagagcaaataaaacgtgcgcaggtcaatttatcattagccacacaatcattaaatcgattagaacctttattagcaaaaggctttgtcacagcacaacaagtcgatgatgctcggacgttaaaacatgatgctgaagtgacattaaaacaagcacagaaacagaatgtggcatctgaagcacttattaataataccgattcagaagaagcattagtcaagtcattaaaaacatcgcttgccatggcagagtgggagttaagtaatactgaggtaagggcgccaagtaatggatatatcgcaggggtcgttttatctcccggtgaatttattttatcagggcaatctgtttttaccttaattgactctgatacttggtttgcttcggcctattttaaagagacagatttaaataatataaaaattggtagctgtgtggtgatttactccatgattgataatcaacaccccattaaaggtaaagttgaaggaattagtcggggggtcatgtcgaccgatctgattaatattccaagagacttaccttatgtacctaaatcattaaattgggtacgggttgagcagcgttttcctgtcaaagtcattattactgaaccaccagaagcactcatgcgcatcggtgccactgctactgtaaatattgtacctaacgatgatgactgttaaatcttcgctgatagcaaaacaagtcaaacaagatttattaccttttgactatcggttcgccactacgtggcgcatagcgttactgtgtgccttaatggccgtgatcgctatggtttatgaaatccctgaatcagcaatcagctgttatttaattatctatttgattaaagcggatgcggtacaaaatatattactctcccttggggtcattattttatgctccattgtggttggtgtggcgttagtactgtttaatctcactattcaaaatattattttacgcttcttttttatggcttttttctcagccatttttatgtatttagcttcagcaagtagtcttggtgatataggcaatttagttgctttggtgatcgcctttttaatgacgctaattgaagatatcccatttggtgatgctgcaaccagaggattgctttatgcgttattaatggccgtttcgccgatgctattggtgattatattcaattatttttttggtattagcccacggaaattactgcttaataaaatttcaacgcgctttatggcagcccatgattttttcttagggaaaaaaactaaccagataacgctgaatgaaatactaggaacacaagcagaatgccaacgttatttgatggttatgaaaatcctttatctattaggtaaagaagatatccaatggttagaaaacatggttgataactcctatgcaatattagttatgtcaataacaatggatgacaatacctcaacatcgttacgttttatgttagcgaaaagatgtaaatatattgcggactgttttgccaaccactcgttagataacattaaagatagtgtgcaacgtcttcagccaataaatagaatcgctttattggctaaatttaatactattttgctaacaaaacgaaccactaaacccattaaaaaagccacacccttttttgtaagcgatgcatttagtaatcctaatcataaatacttcgctattaaaacaactcttgccgctattttatgttatttgttttatgattattttaaatggcaaggtatccatacagcgatgatcacttgctatgtggttgcacttacttcagtgggcgaaacggttcataaacttacactaagaataatagggtgtctgattggcgcattaattggcatgatctcactgctttatattattcctaatatttctgatatttttcagttgatggtattgatcttcttctgtcttttacctgcagcctgggttgccgccggtaatgaacgtatctcttatgctggcgtacaagtaggcttagcctttttgctaacgacactacatggctttaaaccgagttttgatatggatgtggtttccgaccgtattttgggtattttattaggcaatattgttatgtatgtcatttttactcgagtctggcccgcgagtatcgtcaatacaatatacaaacagctcgccacgattttagatgactatacaaagttaagatgctctgccaataaaagtgagtgtttagatttagtcgcctctattaatgagactattgcacaatctaaagataatattgatttactgctgtttgagagaaaagataaagaaagaaacaaagtactcaccttgttttttaaacagtcattaagcaagatttcttacatcagtcgccatagttatgctgataggtttatttttgatgataatggagagtattccgatacactgcctttatctccagatgattttaaaaaaaatgtcttaactgaagaaataaaaatgttgcccatcaatgaaagagaacaagtatttaaacagttaataagagaaaatagatgatgataaaatcggccattaatcataaaaaatatattctatcatcgtggttaagtttattacttgttggatgtattgatactagcgattatgggaaatactcagcacaacaaccgatgccttataataatacaaactatatggcagcttctgagcaatacctcgccacacctcagcaagagcaaaccactaaaacgagctatggattggccgagcttatcgatcttggtcagcaaaataatcctgaaacacggattgcttggttattagcgaaaaaatcagccaccgatattggtatggtagaaagcacttatttgccgattattaccgcaacggcattggcaggctatcaaagaggaaaagtagatttacccgccaatccaattgttgatgatattaaaacatcaaacagtgcttttattccagcgttaacctttagatggcttatttttgacttcggcaaacgaggagctttagccgatgccgctaaacatgcttctttggcaacaaaccttaattttaatctgatgcatcaaaaaataattcatgatgtttctgttgcctattttagttatggtgcggcccttaaaaaagtcactcttacccaagaggcactgcaaagaagcaaagatattttatatgccatagagcaaaaacgtgcgcggggattagcaaccgtattagatgttgctttagccaaacaacaagttgcccaagtagaattacaacatgtgttagctaaaggtcatgaaaaagatcaatatcagttattactgtctgcaataggtgtctctccctttgaaaagataaaagtgaattatgataatgacgcgcgcttacctgatgatatttccccattgactcacgatgtgataaaaaaagcgttatcacaacgccctgatattttagctcactatgaattagagcaagcggcattaaaaacggcacgctctgttgaatctgactattttcctaaagtgtatctcgccggtgctcttgctggtggttcggggcattttgatgttcaggggttacctgaaattagccaacgaacttcatcgtcgaatattttaattggcgtgagtattcccttatatgaagggggcatgcgtcagtcgcgaatgagcaatgctcaatcagatatccaattagcacaagaaaatttgcgcaaaagccaagatacggcaatcaaagagatctctctcagtgagaatgcgttaagatcggcccttgaagcaaacaaagcggctaaaaatctcgttgataccgcacaattaagttataccgccagtgtcgatttttttaacaatggactaggtacagtaacggagattaataccgcagaaattgcactattaaatgcacaactctcacatatagatgcttatacaggctcattaattgccgcagtagatttagcctttgctttaggggatattgatcagggcttacctaatatacaccttgataaatagagataatcaccttataaaaagggctgcctatcaaataataaagcaatagagacttttgtgatctttgaaatcgccagaacaataatacattatggtttacattttttagcgccaatagcactcgcttatctattttggggtaaaaactggcggcttgctgcgcttcttatgatgagtacgatggcaatagacattgaccatttgtttgcaacgccaatctttgatcccaatcgttgcagtgttggttttcatccattgcatactctatgggctgccattgtctatatcgttttatggtttattccttcttggaaatggaaagccattgccgttgggtgcttatttcatctattaaccgattctgttgattgttatttaggtggtttaaaacctgatatggctataacaataagctgtaataaactttattcgccagaaacgccattcgaatattaaaagacaaaacaccacaatctggtagtaattacaataagcttgatgtagagtgctcagtcttttttttaacgaagtctagctgggaggcgatatgtttattggctttgactatggaacatcaaattgttctgtggcaataatgaaagaggggaaaccaacgctattacctttagaaggtgagaatgtttatattccatctactctttgtgcgccaacccgtgaatctgtttccgaacatttatttcgccacttaaatattaaacctaccaactctattggcgaacaactattaagaaaatcaatcgcgtttaatcgtgatgaagatattgaattagtgcctgaggatattgttttcggtcaggcggcattaagtttgtatctaaaagatccccgtgatgtttattacgtcaaatcgcctaaatcttttcttggtgcctcaggtttacatgagatacaaatcagcttttttgaagatttagtgtgcgccatgatggccaatataaaacaacaagcggaacaaagcacccaagaaaccattactgatgccatgattggtaaacctattaactttaatgggttagggggagaagctgctaataagcaagctgaacgtattttaattaatgcagctaaacgagccggctttaaacaggttttatttgaatttgaaccggtagccgctggtttagaatatgaatccacattaaccaaagaccaaacagtcttggtagttgatattggtggtggtacaacggactgctcattgattcaaatgggccctagctatcggggtaaaaccgatcgtgccagtacactattagcgcatagtggacaacgtgtgggtggtaatgatcttgatatttatctagcttttaaacagctaatgcctttatttggcatgacagggctaacttcatcgggcataaaattaccgctaaaacaattttgggatcctattgccatcaataatgttgaagcacaaaaagatttttattctcaacaaaatttagcggcattaaatcaactacgtcgtgatgctcaagagccagaaaagataaaacgcttaattgaagtctataatgaaacactaggatatggcattgtccgcaaagcggaagaggcgaaaatggcattatcagattgccatacctatttagccagcatcgcgttattaagcgaaacattagaaaccaatatcactcgccagcaaatggttgaagccattggctcccctaaagataagatgattgatttggtcaatgatgccgtacaacaagggggcgtagtacctgatgtggtgtttatgaccggaggctctgcgcgttcaccgattttatgtcaagctatcgagcaacagttacctaatgtgcctattgtaaaaggtaatgatttcggctcagtaaccgcaggattagcccgttggggtgaagtttgttttaaataggcggttttaaatcgctctatttttaaatatattagactcagcatgtggtgtttatttgataatttgtcaattaaaggccatatgcttttcttttatctataatagacagaccaaacacaacataaataggagtacacgtgtaccgcttccaaaatgattataatgaaattgcacatcctgcggtcatgaaggcaattacagatacagtaggtcaacgttatgatggttatggtatggataccctttgtcatcaagctaaagaattaatcaaacagcgaattaaacaacccgaagcgcagatccatttttttaatggtggcactatcactaatttaaccgctatttctcactttttacgcccacatcaagcagtaatttctgtcagcaccgggcatattgcgactcatgagacgggagcgattgaggcaacaggccataaagtgatcaccactttttctgctgatggtaaattgaccccagatttattgaggccgatcctcgctgaacataacgatgaacattgggtgcaacctaaacttgtttatataaccaatgccactgaaattggcacggtatatcgtaaagccgaattacaagcgttacgcgaattttgtgatgcacataatttatggttatatcttgatggtgcacgtttagcgacagggttgatgtctgataatagcgatctgacgattgaagatatcgcacacttaacagatgctttctatattggcggcacgaaaattggtgctatgtcagcagaagcattagtgatttgtcatcctgcattaaattctgattttcgctttagcttaaaacaaaagggcggattacaggcaaaaggttggttattaggggcacaattcgcggcattatttagcgacgacctctactttaaattaggtaaacatctcaatgagatggcctcacaattagccgcattctttactgagcatggttttgattttttagcaccagcagaatctaaccaagtgtttgtcattttacctaatgatattgcagaaaagctaacgcagcagtttgtttttcatcgcatattacttgacgatccacagctaagctgtttgcgcctttgtacttcttgggcaacaacacaacaagatattgatgattttaaagttaaatttcttaaacttatttaatcggtctatctgttagtttaatccttcactcactttatgatattacgcgtgtaataagcgcgtaatatctatctcgatcgcgttttactatcaaaaaaggcaattgattgattgtgagtcgttgaaatgatgttatattaaagactcctttctcaatacagggtgtgattgtatgaaaaagctgactcttcaagagatgacagatgcccaacagatgcgcgttagaaccaggatcggtcaagagagaaagaaattggggcgtgaattaactaacgccgaaatgaataaagtgaaagatgctattattaccgaaatctccctcgaagtagaaaaagccagcaaaaaagccctttcccagaagaaaaaacagaaattagtctctagtgatgaaacctatagctggtctgcccaaaaccatcgtcgcgggtatcgttagcaatagctattatattagccctaatatatcaatatatttattagggctaatagttatattttcttgaaaggtatcagaataatatatttgtagggcaggctatatcttctagtaataagtcaccttcaattaccttattatataatatcgttattttaacttatcataccgtagaaaattccatataatagaataaaagctgaaacttatccatatggatagacaaattcctaaaataatgaatttctctagcgctaagtattaccattcctataaaattaagcactagttggtaaataaaaaaagaaaaggcaatttaatatctccttattcattatttattgattagaattttatatatgactttcgacatttttttatcattagccatattttcatttgttacttcaattacaccaggcccgaataatattatgcttctagcatcaggtattaactttggcttaaagcgtacaatgcctcatgctatcggtgtgtctctcggtttttttgtgatgttattggctgtggggataggcataggagcacttattaaatcatcgcccattatttacaatatattaaaatatctcggagcgctgtatttattgtggttagcttggaaaacggcaattagtcattctgttgagcaaaatagtaataaacaaggctcaccgttaaccttgttagaggctgcattatttcaatggattaatcctaaatcatggatgatggcgatttcagggataacattatatacctcaccacaatatccttatatttcaatgttgttagttgctattattttcacattaattaattttccttgtgttgctatatgggccacttttggtcatagcttacgagagcgattaaaaaatcccaaaatattaaggctatttaattttattatgggtggtttattagcattaagtgctatttctgtattattccaataaatagaaaagggcaagtatcatctcgccctttgtataaccctgatgttaacgcaatattgttttatattttcattgtttcaataagtgtgtagagctttttaaaggcattatatttatcttgatatgccttatgtttttctaaattgggaacatgacgtgtttcaagttttggctgagaaagaataatttgtgataaatgagccggatttatcgctaattgcgccagtctagcagctcccagcgcgggaccaacatcaccaccttgacgataatccaaggtttttcctgtaatatcagctagtaattgtcgccaatattcacttcttgcccctccaccaattaacgttatattgtctgcgtgttgtccagccttatccgccacttcaattccttgcctcaacgcaaaactaacaccttctaacaccgctcgacataaatccgcacgctgatgttggtgagttaacccccaaaatacacctttggcatccgcattattataaggtgtccgttcaccagaaagataaggcaaaaagagtagggaactatcagaatgagcatgctgttctatttctttaaacattgcaccaacatcactgatccccgttaattggcatgcccaatctagacaagaagccgcacttaatattaccgacattaagtgccaagtttgtggcaatgcatggcaaaaactatgtaccgcattgtcactgttttggagaaacttttcactgacaacaaaatagacaccggatgtgcccaaagagagcattccttgacccggttgatatactcctacaccaattgcacccgctgcattatcaccaccacccgctataatcggcacttgtttcatttgccattttttagcaatttctggcagtaagtaacccgttatctggttaccttcaaataaggtcggcatttgacatcgagaaagccccgttgccgctaataattcatcactccaatcgcgtttttgcatatccaaccacagtgtacccgccgcatccgacatatcactggcaaaattaccactcattttccaacgtagaaaatcttttggtaatagcacatgagcaatctgacaaaagatctccgcttcgttttctgcgacccattgcaatttaggcgctgtaaacccaggcataactaaattgcccgtaatttctttaaattgagggtactgctttgccagtcgtaaacactgtttaacactgcgaccatcgttccataaaatagcagggcgtaatatattttgctgcgcatcaagtaataccgcgccatgcatttgaccactgagaccaatggcttggatctgttccataggttgagtacgactcagttgttttatcgcttcatcagttgcctgccaccatgcttgtggatcttgctctgaccattgaggatgagggcgtgagagggttaaaggtatagaatgactggcaacgacatcaccttgctcattcatgatgatcgctttaacacttgatgtgcctaagtctagccctaaatacatgacgttttaccccatgatcttatgttaattaaatcaataaacacagcgctactctgctgtgtttatctttttatacccttaaccaaaaatataacgattcactaaactctctagcatctcttgacgtccgctttgtaagcggggcgctaaggtattgctttgtgcatattttgccacttcttcaagacttaatttgccttgtaggatattttggccaagttcagcactccatcccgcataacgttgagcaataaatttatcaagtccaccgtcttggatcattcttgctgcaatacgtaatgccattgccatggtgtccattccggatatatgcccatagaaaagatcgtatttatcattactttgacgacgtactttggcatcaaagtttaatccaccagtcgtaaaaccaccggatttgagaatttcatacataactaatgcattttcttctacactattggggaattggtctgtgtcccaacctaattgtggatcacctcggttagcatcgactgagcctaaaatacctaatgcaatagctgtggcgatttcatgatggaaactgtgacccgctaaagttgcatggttagcttctatgttcactttaacttctttttctaagccaaattgttttaagaaaccataaactgtcgcagtatcataatcatattgatgcttagttggctcttgtggcttcggctcgatgagcagtgtaccttggaatccaattttatgtttatgctcaacaaccatctgcataaaacgaccaatttgttcccgctcttggcgtaaatctgtatttaataatgtttcgtaaccttcgcggcctccccataacacatagttttcgcctcccagcgtttttgttgctttcatcgcttcacaaacttgagttgccgcccaagcaaatacttctggatcaggatttgttgcagcaccagctccgtaacgaggatgagtaaaacaatttgcagttccccataataatttaacgcccgtttcttgctgtttttgcgctaatacctcagttattgctgccatattggtgatatattcattaatgctatttccttcagagataacatcaacatcatgaaaacagtaaaaaggtacattgagtttatggaaaaattcaaaagcaacatccgctttacgctttgcttgttctagtgcttctcccggtgtctgccaaggtctatcaaacgtaccaataccaaacatatccgaaccattccagcagaagttatgccaatagcaggcagcaaatcgcagatgatcttccattcttttccctaaaataatttcatctggattatagtagcgaaaagcgagagggttatcgctggtggtaccttcatattgaatttgttcaattttatcaaagtaagacatggaaccgtccttatttagtatcaagttgtaattctgaatgtgatccaagctcagcagtcatttcttcctgctcttctggtgttaatttagcaatgccaaaaccggtgaaaccccataacatggcaaagaagatgccactccagcacaatacagcccaaggcaaataacttagggttgcaacacctaatgtacccgccatataagcgccggcagcagtccaaggtaagataggctcaaaaatagtggcggaatcttcaacagtacgagcaaggtttttagggtgtaaaccgcgttcaatatacgcaccacgtaacatttcgataggaataagaatagagatttgtccattgcaagtaacaccaatcatggtcagtccacaggcaatagtcgctaagatcatcgatcccgttgaatgcaccatttttagcagtgcatgaactatcacttctaatgcaccgcttaaagatagagtccccgcaaaggagagtgcgcagaaacagataagtagggtgctcatcatggagttcataccaccacgatttaataaattacctaataattcaggtacttctttaccttggatcatggagacattaaagccatcaacggcactttttacgatatcatgtaagccaaatccttgaataagataagcattcaacatcgcaatagcggcagaggccagcataactggaatagtcggttttttcgtgaccgaaccatataaaatgactaatacaggaataagcaggatcaagttgaagtggtaaatattctccaacccattggtaattaaggtaactttttcaggcactccttgtcctgctaaatcgccattcataccatagacagtcatgataatcgctgtgaggatcaaggaaggtaatgtggtataaagcaggtgacagatatgttgataaagatctattctggccgccattgcagcaaggttagtatcccctgatagcggtgagagtttgtcaccaaaataagcaccagcaacaacagcacccgcagttgctgcaagattagcctccataccgacagcaacgcccataaaagcgacgccaatagtgcccgccgagccccatgaagtaccagtacaaactgatactaatgatgtcactagcagtgctgtaacatatagcatttcaggactgatcatctttaatccatagtagatcatcagtggaatggttcctcccaccatccatgtcccgattaataaaccaacgctaattaagatcagcaaagccggcatcgttttggcgattttttgtgagatagccgttaagatttcgtcgtaacgatagcctaatcgtttaactaataatgccgcgacgacggttgataacaccattagtggttcgggaggtaaatcaaaagtggcgtaacctccgcctaatagcaccaccattgtaaatataggaaacagtgactcgagaagtgtaggggttctcggattatttatcgtttgcgttttcattgtaatttattccaaactggcgtgaggtgaggtacgaataagccgagtaaaaacggtttctaatattgaacgaggtgtagcaatattaatgcggaaaaaaccatccccagccgcaccaaaaccgcttccccaactcatttctacttcggctaatgaaacaaaccaatgctttaattgttgttcggttaactgcattttttgataattgatccatagcatgtaggtgccatggctttgagtaataacccaatcaggaaaataacgtgcacattgctcttttacccactgcctgttttcagcaaggtaatgtttaagctccttgatccattgttgaccttgtaaggtataagcttgtaagaaagcagggacagagaagtaaccaggattatgaatacctgcggcaattaagcattgtttaaatttctcacgatattctggattagcaatcacaatattggctatttcaagccccgctaaattgaaggttttagccggtgatgtgcaaataaaagagtgttgctctacatagctacttaaagttgatataggtcgataaatggcattatcaaaaacaaaatcagcatgaacatcatcagaaataataaaaactttatatttttcagcaagtttagcaatttttaataaatcagcttgttgccatactgttccggttggattatggggagaaagcaatataaaacagacagattgtttaaatttatcttctaaatcgtcaaaatctatttcatagcacccattatgataaattaatgggctttctagtagctggcgatgatttacacaaactgtattgctaataggatgataagcaggtgacaaggttgtcactttatcgccaatttgagtaaaattttgaatatagagagagacggcttggataatacgagggcaaaacaccacagattcaggtgtaacatgccaagcatattgagatttaaaccaatttaccgcaacattattccaatcagagctaagatcggtatagccataaataccggttaaattaaactgactgagtttgttaataataaaatctggtgcagaaatatccatatcggcaaccgataatggaataacattggcgttactgttgcaccatttagcactgtaggtattttgcctagaaattaatttattaaagttattctgattcatgaaaatcccctcggcaatgtggtttaacaacaaaatactcgttgtacttactcttggttattcctattttttactttgctattacgaaatctgacttgtgtgatagtaatcacatagccacgaaggagaatgctggcaaatacaaagctgtggtttaatggccaacatggaagagtgggtgatctaatatgaaaaaagataaatattttcgtatcgtgctgttattcaacgctaataaagtctatgaccgacaagttgttgaaggggtaggtgaatacttgcaggcgtcacagtgccattgggatgtatttattgaagaagatttccgcactcgccttgataatattaatcattgggtttgtgacggcattattgcagactttgacgatcccattattactcaacatttaagccaatcacccttatctgttattggtgtcggtggctcttatcatcaagcaaaagattatccttctgtgccgtatattgctactgataattaccaattgattcatcaagcttttttacatttaaagcaaaaagggcttaaacattttgctttttatggattaccggcaaaaaactacccgcattggtctaatgagagagaatatgcattccggcaattagttactcgcgaaaaataccctggcatcatttataacggtatggatatcacacaagagaattggcaacatgcacagaatcgtttatctgactggatacaaacgttgccaccacaaactggtattattgccgtcaccgatgccagagcgcgtcatttactgcaagtctgtgataacttaaatattaatgtgcctgaagaaatcagtattataggcattgatgatgaagatatgacacgttatttatcacgtatagcgttatcttctgtagtacaaggttcacgacaaatgggatatttagccgcgaagcttctgcatcaaatattagaagggcatccaaccgaacaactaccaagaatattagttcctccagtaaaaatcattgaacgtcgctcaacagactttcattcatttagtgatcctaccgttgtacaagcaatgcactatatttattacaatgcttgtaaaggaataaaaactgagcaagtgttagacgctgtaaatatgtcgcgttctaatttagaacagcgttttaagaaagaagtagggaagactatccatgccgtgatttatgaagagaagctgaaaagggcgaaaaacttattagccacaacaacattatcaatacaagagatttctttgatgtgtggctatccgtcgttacaatatttttactctatttttaaaaaagagtttggcatgacaccaaaggattttagagatgagaattaataaaaataacaattattttttatagcgactatttgcccaaggatcactttcagaataattgattgtatcatcaaggttttcttcaacaagatttagatatagtgcttctacctcagagcgcgcccaaggggttctgcgcaaaaatttcaaactcgactttacacttggctcgtttctaaaacagttaattttgattcgttggcttaatttaacccaaccatatttagccactaacgcattaacttgcatttcaagcgtgataccgtgtagtggatctttagaacgagcttctgtcatggtttactcaaataggttgataataaagcgtagcagagtacaagaaagtaacacaagagacaaccaaagtataaagccatctatattgttattatggttaaaaatcataaattacaatccatattatagggagagaaatccggatttttattttttatccaatcgataataagtggtaacgaaccttcagtgtaagctttacggccagcccacagaaattgtaattgacggtatattggccaatcactttctaattgataattaaattctggcacacggagtaatccatgactagcatgagggaaaacaacaatatcagcttgatgatgagtatttaatattgcacgatagcgacaagcattaagctgagcattaacgtttaagtcattatttccccataccgctaatatacgaccattcatttttcttaaataacttgatgaatcacttaagtaatttttaacaacaaaattaaatcgatcttcactcatatcattgcgacgagtgcgatcttttgtaccatgtagtccaaaaatatcatcattttctttttgttcttttgccagcaattgtataatttcatccggtgtttttccttgctgttcataacgcaatttttgataatattgtccttgttctcgccaattgacagcaccaccaataatcacagaaaaagctggttgtgattgactagcggcgataggaataacccatccggcttgagaaaaccctaaaaaacctacttgaacttcgggataacgaagttgcattaattttaatgcagctaccgtttcttcagcgcgagcttccattgattgatgtagccagtttccttgactatcaccaatgcctgctttatcccacgagaatatcgcgatatttgcatccaaaaatgtattgaacagagggttgtagccaccatttgaataacgatcttgaggcccatcaccatgaataacaacgataaccgctgacggagtcttatgttgaggagtaagaagagttcctgatagacggtttccttgagataaaaaacttaattcttcttgatctttgttttcatagtcaaagtcttgaatatggcttgtaaaaaataatagggtggtgataacaagcagtaatagaataaatatagcaattatatatttacctacagcataatgaactttcattatttttctcttacgttatgtttttgcacataaaaatctgataatactacattttttgttataaatataacaagtaacaagtgcttttaaagatatcattgcttaataaagatactaacttcatttctactctacattcagtacagagtaacatttcaataggtatcgaaacgtttattattttctttgttatcctgcttattcttaacaaggagaataaaatgatcgctgttatctttgaagttcaaatagccacaagtaagcaggggcaatatttatctttagcatctcaactaagaccattactaaacaacattgatggatttatatctatcgagcgctttcaaagcctagcgacggaaggaaagctattatcgctttcttggtggaaaaatgaagatgctatactgcaatggaaaaataatattttgcacagcaaagcacagcaggaaggtaaaaagagcatttttgatttttataaaataagtatagttaaactagaacgttgttatgagtttacaagtactcacacgtaattgcaccgtactggacaatagagccgttataagatgaataattacaaaacaaaaacggaatatgagcatactttggagtcagcaatagccgcggttggagccgctattgcggatatttccagagtaaaaatactctgtgctttgatggatggaagggcatggacagccaccgagttgagcattgttgcggatatctccgcatctaccacaagtagccatttatcaaaattactcagtagcggccttatttctgtgatctctcgtggtaaatatcgctattttcgattagctagtgatgatatagcaaaagttattgaaaatttgatgagcttctcaacagttcatgtatcacaagcaaaaattaccaccccagaacatttaagaaaagcacgtacatgctataaccatttagccggtgaaattgccgttaaaatttatcaggtactttgccaagaagaatggataacaaaagatggaacagaaataactgaattcggagataaacgctttaaattgatgggacttaatttccaagcaaaacattcgcgcaatatttgttgtccttgtttagattggagtgaaagacgttttcatctaggtggacaaattggcagtgcattacttaatcatgcacagacacaaggttggataaaacgccaccaaggatatagagaagtgacgattaatgaaaagggcaataaagcttttgcccaatattttaatataacaatatgatctagatgtagggggatatcgtgcacagattagttattaataaaacctgtatagatatcgatagagtaatcgaataaaaatctcacacaaacatgcaattagtgggattaagaatgaaccgtatatgatatagatagtcactgttatgtagccaaattcaccaagtaatgtcccacttcctaagttagaatttttgggtaaatcgaagtagatatgtgtataccatgcaaatagagataaaaaataaggaaaaataaaataaaacaaacatttatatagtgaattcatttttccatttaaaaaaacaaacacaggtgttataacaatcagatagacaaggtagtagtgacttataatattaatatgaccgaataatgctatggcattcgtcgcatgcgaaaatatattaaaaaaaagctgatgagccatttcagcataataaaaaagcacactgataaatattgatatatatggtattagggagttcttattaatacgcacctgaaatgattcctcctcgctctggaaaatagatatcaagcagttgtttttttaactcccaaggagaacgtatataaattggagtatcaagattactaaatacaccaccagataactttaaaacatgagtgattctagtagcacaaaataaagcattagcaccaccaagttcataaataagtttggtaatgtgttcagcttgttctctcggaattacaaactctataataacgatatcatcaccatcccataactggtaagaaaggtaatcatcccaattgaaatcaggatattgaaagaaatcacctgacccccttaatgtgtaagaaccatcttcacattgattatttttacatccggtatagcttccagcaggatcatataacaatgcatctataaggctaaataaaaaactattacgattttgaatggtgtaatattcttgtgacttagttctactatatatttttatctctacatagtaaatgtcatatcgagtatcccataaaaattctcagattggttagaagtggagttattaaattcttaacacatatctgagtcaatagggctttgaagcgctaaatcattaaaagaaagcatccataaagttattggttattacatgccatttaacataatatacattatgcgaaccacgataggtaaatacggatagtcgctgaaatctctgtttttggctgattgattatgttggttggacccaatgttttttgtctttttatcagatactactttagaaaggattttaataaagcctttttagatgtttctaccgtcagttaagttagaaggttcttgattcacataatccactatatgtataaagacgaaccttctcgattgcggtaaaccccaaccccattctaccgcaatcgctcagaacccttttgtaacatagcgtcacacattatgcgaaccatgataggtaaatacggataggcgctgaaatctctgtttttggctgattgattattcaattggacttggtcactactttagtatttccaaccgactttctttaatttatatgctgatgctacattgctagccgaggtttgttataggaaatgatgacatgttcataatatataacacatctcatatataagagtgatttttgtatatttccttgttcgtcttatttctatatttaatacatcagaatagataaaattaaagctccattatagttaaagtaaattattcctatagagatagtcgcataaagataatcatattggaatataaatatttttatgaatattccttttttatatgctaggctaatttaataaaaaccttgtctcttaataagaaataatttttagtaaattcctaggaacatttatgaaaatgaaatactcaccattttttatattactcatgacaataggtacaacattaagctatgctactgatggtgaaattaaaataatggcagggaaaactggctatgtaggcgaagttgttccagtgacaaaattagctgaaacctttcctaaaagtttcactgccccttcgagcgctaattattatgctaggcttggttttctgagccttaccaaccagacgggttattgtggtagtaccgatgggctacaaaaaatacctgaaattaatgaatggggatttaaactaataaataaaaactatcctacctctggctatttactattggcgataaatggaaacattggaggacaatataaaactaataattcaggtatccaaaatataaaaggagtattaactcgatctaagttgactcgttcaagtttatataatgtaagcaaaaatggttctttttgttggggaccttcggcttatgatcaagaaaatttttatgatccttcttttcgatcttttgtctctatcagtataaatagttattcagtttatgcatatggcgatataaaacctggtattttttcattagaaactagttttaagttgtcaagaaatacagctaatagcgttgatgatagtactgcttattttatccgccctggagaaattaaagttacggccttaagaagctgtaacgtgacaagtagtactgagactaatattaaatttaaagatcaatttacatcaacatttacttcaccaacattattagatacttcaccagtaaattccgttaatgttacatgtactcaaggtggaaaaaactatattacaataaaagcttataatagtcttgttagtggaaatatgtctggaatgcttttaaatggaacaaaatcaaacaatcaatcagaagtttatgttgttgcatcattaaaaaatttaacaaatcaaacatgtcaagcgaatgatacaagtgccattagattctttgatggtcactatatacccaatatggataatataaaatcctttaatcaaacttttctatttggcctatgtgctaatggcaaagttatagcagataaatattcaggagctgtcgatgtttcatttatcgttgagtaattattctgatagagcagaaatcagatattaaaaccaattttaactaagttttttattaatatttctctaaaggtataaatagtaattttacacctatttatactatttacaccatttgtcacaccacttgtgaattatacaacttccccatttaattctaatatatttacattccaattttgactacctaattcacacaccataccaccgtcatatataaattctttcttctcattattctcaataaaacgggtgagatttttcatcggaatatatccagaggagagataataagcatgagaaacagcaaataaaatagaaaaattaacagaatgctctttcagtatagcatgagccatttttattaatgatgccgcaacgccctttcctcggtatttgtgagccaccactacacaactcaatataccaatggtttcaggaaatgaatctaggtaaacatctcgtaaataaacagctacatgtccgataacctgattatcatcaattgccagtaccaacttgtaaggtatatcaacctgataaaaattacccttcatatcctcaaaagctgaattttgtaaggctattgcttgctccagaatttgttcactaacatctgaccaactataacattcaattctcatttgatttctcgctcttataaaaccctttatttattaatggaataatgttaaataatattaattatttattctattggtgacctattgtttttcatttatactccccaccattataaacatatttttataaaacacctgtacaaatagaggaccaatggaatatttaaatacaaaaattattatcggtagttcaatcatcgctttagcaacactgtattttgctatttatttaatactatatcttattaaatgcgttaggactcaaacgccttttactttaagaaaaatatggaaacaatggttattgagtagtgttattggtctaattggtgcttatattgtacaacttggtgataatcaaagaagaagcgaatttaccaaagaagaggttagctttatgaatgaaaataaagcatatagccaatttacctcggcagacaaagatctcgcgtcaaaaataacccataaatgtacttacaattcagatgctgtatttgaacaatgtttaccaaaaatactgacttgggaagcaaaaatttatcaatcatataatgcacatcgtaaaatttctgatagtgaagcgataaaatatacagaagaagaattacgcgataagcataattactggatcaacaaaaaacgctaactccccgtctgatccgttagatttaataggcttagagtctgtaagttattttaagcctattcttaatatctctcattttgtaatacaatgctcattgtattaactaacttaatcagatagttagttattattacttttttaatgctttttaatacgcattttaggagtattgcaccctattcttcccgaatattctgatgccagtacgattatgatagcagtaactttataatgttctttatactggagcttataaaaatgaatatcacgtttaagaaaattggaacaatgtgtgtcgcttctgttctgcttttttcacttgcgggttgttcaagcatgacaaaacgcgatcgtaatacagcaattggtgccggtgctggtgctataggtggtgcaattttaacagatggtagtccattaggaaccattggcggcggtgtattaggtggtgttattggccatcaagttggcaaaaaataactattaccgttatttactatgctaaactgagcttataaatttttataagctcagattcgagcaatgacctatatagtaatcatagttacgagtaaatgatggtaagaacggctctattgaaaattaaaaatttgattatttggctttatcatcagtttagcgatctgctccatatcgcggtgacttttgtactctgttatttttgctttcttttatctcccacacttaccattgccgttataggcgtcgtgattattgttgtaaccatgtttttattaagcctatttgttttgccctagcttttttatgacacctctgtattaaaccttctctactgtgacacgaaataaaaaccccctttcaacccactttgatcagtagtgaaaaacgtataactcagtgatgattaaagttaaaaatcttttacattggcaaagaaccttatctttcccctgatttatctcaaagctgcatttttcaacttgactcttgttaacgttcgctttttactttcaaagattaaaacaatgaggataagtaaatgattatatttatcaccggtgcttctgcaggttttggagaagctattgctcgtcactttattaaccatggacacaaagttattggtactgcgagacgtcttgataaactgcaagctcttcatcaagaactgggcgatctattctatcctttacaattagatgtcaccgataaaaaagcagtcagtgaaatttatcaccaattaccagaacaatggcgctcaattgatgtattagtcaataatgcaggactcgctttaggattaagtaccgctgataaggccaatcttgatgattgggatactatgatcgaaactaataataaaggtttagtgcatgtcactcgtgcattactaccctcaatggttgaacgcaatgtcgggcatattattaatatcagctcaacagcggcttcttggccttatatggggggaaatgtgtatggtgcaaccaaagcctttgttaagcaatttagcctaggcttacgtgccgatcttcaaggtaaaaaaatacgtgttactgatattgaacccggtcttgtggggggaactgagttctcattagtacgctttaaaggtgataccgataaagtagaacaaacttatgcaggagcagatgcgcttactcctgaagatgttgcacaggcggttttttggacggcaacattgcctgcacatgttaatattaatacgcttgagatgatgcccgtcagtcaatcttttgccggattaagtgtgcaccgacaaaattaaacgcactgaaaactcattttttgttaagggatcatatatacttgttgatataaaatagtcattgttcagtgctacataattttagaggatagccattatgataaatacgttaactaagaaacaagcaacaaggactctgctattttcactatttcttggtttatccgtgtcttctttttcttctgttgcagcttcaacaaatgtaaccattaatggcaatggctatgataatgttttagataaagagcaagctcgacaaatgaaagaagattgggatcaaaaacgcgatctccgtaataaaatcaaccaacgcgaaaaaactgagtttaataaaatagataaagctattgatgagcgtgatgcttgtttaaaaagcgccaatatctatgcttactgggagccagaaacacgtcgctgtttagacagtaatactggtcgcccaattaacccttaatataaataaaacaatgatgttttaaaaatcaagcaaggagagaaatgttatgaaaaaatatctatttgcattactggctacattgttcgcatttgcacctttagccgcaaatgctggatgtgatgaagtcgttcaagatattcaacaaaaaattgaaaataatggtgttcctgcggctaactttaccctaacagtggttgaaaatgatcaagttgcacagactgaaggtaaagttgtaggtacttgtgaaaatgattctaaaaaaatcatttatactcgccattaatcattgatttaatagaattaatagctaaaaagggtactttgtgtgcccttttcttttttaacctaaatagcgattaggctattaatatttagtattcattgttaaataaaaaaacacccaatgagttaacccattaggcgttgataagtaataagtaaaactaaatattaataggaaataagttattgaatagaaataacttatttttattctctttaattgaccttaactaagcgggttgagcgatttctaactggcttaagtcaagataacaagagagatcacgttcttcagggcgcaataaatacgggatttcaccaatcaatggggctggaatatgttgagataacctttctacaatttttgcatagtgcggtaacccaggattaattctattagccacccaaccaactaattctaaaccatcattaataatagattgcgcggttagaattgagtgattgacacaaccaggttggatcccaaccactagaacaacaggaattttttctttagcaacccagtctgaataaaaagtattatcatcaagtaaatagcgccaaccaccatttccctcgataacaacgcattcagctttttggcccaaattatttagttcacttgaaatttgatggaagtctattgcattttcacttacataacaattttctagcaaaatagggttaatttcgtcgtagcgagcgtcaataggtgaggaattatgaataatctgagcatcacgattacgattaccctcaaccgtttcatgtaattcggttgcgataggcttaaagcccactgctgttgtcccgccacgatttattgactgaagaagtgctcgggtgacaacagttttacctatgttggtatctgtccccgtaacaaacaagcgtgttaacatataatttacttccgttatgacagataaatcaggtttacgaaaaatgacagagattagagtttagggtaacactgtttatggtggcttgagttagctcaattttttagttaattgagtaaaaatagggtaatgtaagtgatcaattggcctacttctctatgcataatactttaattatactttattgtattattattagccttgcattaactcaagtaataatgagccattatataaggcttcttttactagtgatgccgctggcaatgtgcctttattgcgcaattctgtttcttcaataaccaagttatgggcatatctaggtaatacatggtgttggatactactaaggatcagggggaaaagtgcagattttgctctacacagaggtgaacctattaatattttttgaggattaaaaatattgaccatcacggctaaaataaaaccaagtcgttgcgccactaaattaatgatgtctaatgcttgtttatcaccaattaatacagcatcacatagcgtttctaccgtaatcggatattgattaagtattgaggtgggattttcttgcgccaagtgctgtgcttttttaattaactgagggatcgatatttccgtttctaaacacccttttgcaccacaataacattgcgtctgtgaatcaataacttttgtatgccctatttcgacggcactatggctgtttgaatgtaatgtctttccattagtcacaacccctgcaccgacaatatcatcaataacaatttgcagaatatcggtgttatttttggctgcaccatagagtgattcagccatcgtccaagccgttacactgtgttgtaagaaaacagcaacacctgttttttcctgaattttatcagccagcggaatatcttggatagcatagtaaggagagctataaataacgccactaatcggatcaacaattgcattcatggtaatactaattgcagtaaggcgctctactcttgattgataacgttgaaagaatgtatctattgcagcaaggaaatgatgcaaaaaagcatcactattttgtttaggaaagtcgaaggtatcttcaacaactaattgattatctagctctcttaaactaaaaagtaggctaccattatttactcgaatacataaaaattgccaccctttgctctctaactttaaaccaacagccggccgtcctcgaaatcctaacccaggaaattctgtttcatgaataaggtgtgcttcgactaattctcgcgtaattttagtaatactggcaggcgcaagtgttgcttttttagataatgagatacgagaaataggaccatgttcatcaattaatcgaaaaacagtgccaagattaaattgttttacatgatcaatatggctaggcgggatccccatttcatcttatccttaataaaaaagccgtaattaattcgaagctctaaataattatttttcgattatgtcgtcagtttgtgataattgtacaataattacataaaaatcgtgatggaaagcacatataaatcaagatttttgatcttctaagatattttttagcaataattgagtcaacctgttggccgcagcggggatcgttcgtttgttatgagaaactaaccatacttcagagaaagcattcgaattagcaaaatgcagataatgcacaccatcaactttcatgcgggtaaatgattttgtcacaatagaaatccctaatccggcagcaacaagccccaagatggtcatcgcctctccggcttcctgtgctatcgttggtgtaattcccgcaaggctaagcaattgaataatttcatcataaagcgccgttcctacatctcgctcaaaaaatacaaaaggatattgcccaatatcttgaatatttacgcctgtttctttgtatgcaagtaaaggatgcccttcataaactgccaaaataaaaggttcacgaaataggagctggtggtgcaaattatcaggtaacaccgtattacgcataattcccaaatcgatgtggccagttaataatggtgatatctgctgtttggtattcatttgatgcatatgaataccgacttcaggataattttccctaaattgacgcaaacttaacgtaaccaaatgcataaaaggtgttgttgaggtaaaaccaattgaaatttcacctaattctcctttttccattcttgatgctcgtgtcgctaccgccttaacttgtgccataatttgataggatccttttaaaaacatttgtcctgccggggttaacgaaacagaacgattggttctttcgagtaaacgagcccctatctcactttctaaggcttgtatttgctgacttaaaggaggttgggaaatatttaatctctcagctgccttaccaaaatgtaattcttcagcaacagcaataaaataacgtaaatggcgaagttctatattcataatttgtattattcgttgatgtaaatgcctattgatactttaaaagtcttattgctaataattaatatattagacaaaaaaatcaaatgtttctaacattgatataaatcaaatttaagtattggatagccactttttatggacactcatgaaataagcagtaaaaacatggccctaaaagaagatgtttctatcaacaccacttctaaaccaaacagtccgaaacactatatccagcgtgatgacgcgctttatataaaagtgacagtgtcattttttatggttggtttagccacttttgcattactctactttgtgcaacctatcttacctatcctatcaaaagaattttcagtcaccccagcaaccagtagtcttgctttatcgctttctacaggtcttatggcttgtggtctattgattacagggcctctttctgatgcgtttggtcgaaaaaatgtgatggttattgcgttattttgtgcggcttttttcacactattaagtgccatgatgaatagctggacggggattttaattacacgagcactcgtaggactatcacttagtggtgttgcagccgttgcgatgacctaccttagcgaagagatccatcctgcttatctagccttatcgatggggctttatattagcggtaactctattggtggtatgagtggccgtgttattactggtgttttgagtgattattactcttggcgtgtgtctgtgattattttaggtatttttgcccttgttgctgctatcattttttggcgaatattgccgacatcacaacattttaggccagcaaccttaaaaccacgtaatcttcttatcacaactaaattgcattttagagataaaggactccctcttctttttattgaaggtggcttgttaatgggagggtttgtaactttatttaattatattggttatcgcctattagatgcaccttattcattaactcaaacaaccgttggtttaatttcaattgtttatttgagtggaacttatagtgcatcgaaagcaggcttattaaccaataaatatggattaggtaaagtgtttattgccggtgtttctatgatgctagcgggtatattaattacactatttgactctctagcaattatttttataggtatgcttattctaactacaggtttttttgctgcccatgcggtagcaagtagttgggttggacgtcgagctaaacgaggacgtgcgcaggcctcttccctttatctatttacctattatgcaggctcgagtattgcgggaacactaggtgggatcttctgggtcaattttggttggcttggtgttggtttgtttattgcttttttaatgttaaccgcactattaatcgcactgcgccttaatcaaatagcacaataaaaagtcataattttctatctgttaatttataaaaacctattgataataaagaaaattgtgactttactttgctttttttagtatggagtctctattttgaaaaggacaacaaccatgactttaataaaattaccaataatactagcaacactattatttacatctatatctgttgccacagtagacaactgtccaccgactaagccagattgtgtagacgaatatacagcttttcattaccctcctgaagaagattaaaaataaaaccaagctagcttaaaaaaaccgcatataacgatatttaagaaaaatatcatcaacaaagtgcccttttatcgctatactgtataaataaacagtatagcgtaattttttaattttcaccctactagacgatatacattccactgaagtttatgtattgtttttaataacggctaattgtatgttgtaactaaataaggttatagagatgagcaaatatgatgcaatacagcgatttaatctctgttttcaacaacttgaaacagaaatcaatgctcttaccgattttcttcgtcagttaaagcaacttccttctgcggtttttgaattacctgaggtaagtaaagaagatgaacatgatgagataacaaatgttacagtgtcacctagttatgatcttgatgctttagaactctctttaaaattaatgaccaatctctttatctatgataatgccccacatgtcagtagcaagcgtgcgatacgtttaccgggggtactctgttttagtgtcagcaatcctgtatttaagaatgtaaaaacacaagtagagagcattaattcattaaaaaaacagctttcagatattgtgacgaaagagtctggtatttcgaaagaagaacgttttgattttgtccataatcagctaaaaggcttaattacacttaatgcttatcgcaccctcaccctactttctgatcctgatacagtacgttttggctgggccaataaaaacattataaaaaacttaactcgtaatgatgtgttagctcagctagaaaaaagtcgagaagccaatcgcgccgtacctccttatactagtgaacaatgggctgaacgtatcgataaagagataatgaccctttcacaactcccggaaaatgccaaattaaaaattaagcgtccagtgaaagtccaacctattgccagagtttggtattcggagcaacaaaaacaggtacaatatgcttgtcccctaccattattagctttctatattgataaagcgtcggattttaagcccataataggtgaattagctgattatgatgtgaataatattcaaattcgccatcgccctaaagccaaaaagttacaattacttattccacgcttacatttatatcttgaaaaataagcaatagaaaaaaaatcccgctatctgggatagcgggatccaatattgtactagataaaataagcgtataattgcttattttttcatactaccaaccatatcttctggacgtacccagctatcaaattcttctgctgtcaggtagttcagtttcagtgcagattctttcagcgttaagccctctttatgagctttcttcgcgatctctgcagctttgtcataaccgatatgggtatttaatgccgtaaccagcattaaagactcatgtaataatttattaatacgctcacggtttggttcaataccaatagcacaatgctcgttaaagctacgcataccatcagccaataaacgcactgattgtaggaagttatcaataatcattgggcgatatacgttcagttcaaagttacctgaagcaccaccgatattgatagcaacatcattacccataacttgagcgcacagcatggtcaacgcttcacactgagttgggttcactttacctggcataatggagctacctggctcattttctggaatagaaatttcgccaataccgcaacgagggccagatgctaaccaacgtacatcattagctattttcattaatgaggcagctaaaccttttaacgcaccatgagaatgaaccagtgcatcacaggttgctaatgcttcaaatttgttaggagccgtgacaaatggctgacctgataattcagcgatacgtttagcaacgcgaactgcgtactcaggatgtgtatttaatcctgtaccaaccgccgttcctcccaacgcaagctcacacacatgaggaactgaatcttcgatatgtttgatattatgctcaagcatcgccgcccaaccggagatttcttgacctaatgtaagtggtgtcgcatcttgcaggtgagtacgaccaatcttgacgatatcatggaaagcttctgctttctctttaaatactttcagtaatgattttaattccggcagtaaatcctgacgtaatgcgataacagcagcgacatgcatggccgttgggaacacatcatttgaactttgacttttgttaacatcatcattcggatgaattttgcgttccatgccacggataccacctagtatctcactaccacggttagctaacacttcattcatattcatatttgattgagtgccagaaccggtctgccagattgctaatgggaattcagttgggtgtttacctgccagcacttcatcagcagcagcaataattgcatctgcacgttctttaggtaataacccgagatccatattgacaccggcggcggcttttttggttaaagcaagcgcgtggatcagtgcaacaggcattttttctactgaaatacggaagtgttctagagaacgctgcgtttgagctccccataactggtcagctggtacttcgatttgtcccattgagtctttttcaatgcgagtggctgccatttcaatctccttaagtacacagaataattgattagttccgaattactttctagtaaataactcggatacagctatcatgccataaatagaataataaatatgagagctaaagcgagcttatgaaatttataacagaatgaaattggttgatttttctgattaaatgaggttggctcacgataatattggtgtttttgctctctatttataaccatattaattacaagcttttattctgtatcataaatacaaatatggcttaaataaatatacttttaatccaaaaaagaccaaaaaacgacatttttatctttaattgccttatttaagttatctataattatttctctttaaactcattgtgttagcttataactaagtaagttctgattgcgttcttatttcactaaatctatatttacagagaatatagatagcaattaatatacgctaattatctatattcatattcagagtattgataaccaaaaccaatttgttggattgtttaagggtagcaaaacaatcttaagaacgtatgctacgaagcatacacagaggatggactagaattatgaagaaatcgcttgtcgctgttggtgttattgttgcactaggtgttgtttggaccggtgcatcatggtacatgggcagtaaaattgaaagccgcttacaggaagaaaccaaacgcactaacgttcaattagcgcaacttgctaaagaaagccaattaggtgcggatattaaacttgaaattcgtgactataagaaaggcgtctttacttctactgctgatcttgcggttgtgatttcagagcatgccaaatcagatgaagataaaaaagtagaagaagtgctctttaagacggatattgaccatgggccattccctctttctgatattgctcaatttaatctagctcctaagttagcagcaatgaataatactttagtgaataatgagaccactaaagatctatttaagttgaccaaagagccatcatttattgatatgcactcttctttatcgtttgatggcagtgtatcaggtaaagttaacataaatcctattaattacagcaaagatggtagccagttaacaacatctgcgtttcagattgatttttcttccgataaaaatgcaacaaacatctcaacagcagtaaaaggtgatgaagtcattgttaagaaaggtaatgatgaaacctttacgctgaaaaatattgcaggctctgtcgaaggaactaaagttaaagacgatcaatatctatttgatacacaaacactgaactttggcgatattacctttacgagccaagataagtcatctaatttcactttaaaagatacttctcttgctactaagagccaaattaaagataaattattctttatcactcaagattatagttttaaatctcttaatgttggtggttttgattttggtgcgggtaaatttgcttactcaattgataaagcagacccagatgcgatgttgctattaacaaaagtttataacagcaccttcttaccttggaatcaaaataaatacgataattcagcgatgattgagcaagctgtacgtgatgttttggaaaaaggtttagtattccgtatcgatgaagcatcgcttaccaatagcagtggcgcaagcaaactaaactttaagttagatttaaatgcgttcaatgctgatgcactgaaaaaagaagacaaggcgccttcagttctgtttaatgaattgtttaataatatcaattttaatatcgatctttctgtaccaatgctaacggagttccgtagtaccacacaataccttgatgttatgcgttattctgaaaaaggcttaacagacgaagataaagctgaaattcagaaaacaaccgctaacgacatggcacagttaaaaactgaattacagcaaaatatcaatcaaatttctcaagacgagaaagatgctctgccattgatgctgttatcacaagacggtaataaactgtctttaaacctgaactatgctgctgataaatttactatgaacggtaaaacttacagctttgatgagtttatggaagtaacacaagcccctcaaatgttaggtttagcggctatgttatttggtgcaggtgcttcttcttatgattatgatgactctgattatcctgaatattcagaagagccagatcaaaatgatgcaatagaagagccacaagttgaaatcccagcggcacctgctgaaaacaattaattttagtcactgatagcatacagtcactaatcaataaagccccctatcaccattcttatgataaggggctttttattgttattaacaatcacaatgaggcttaaacacttcgcgtgtgccccaatcttctttacaacatgaatcaatcgctttatgcattatttctgcaagggtattaactgttgatataatagtagagagctcttcacaaacatgacgacacgttgaattatctttattcagatcaggaagtttaggtaatgttaaactgtcacatagaatttcttgcagaactaaagaaaaattagcgatacctgttgtgtatatataagagcgtcctcccgtcatctgcgctaagcgcacatactctttcgtgatgttatctctatcagcaatagtaggaaagcgatccacattagagggatcatcattaggcgttccctgataagtatatacttttactttttcgcttctagcaaccactattgcctcattgtttttaagcacagcggcttgtgttaatacacctccgccaccttccataccttcatcacctaagacaaaaattgcacgacgagcgccatctcgccaatcgaaatatttacacacatcaatgacggctcggcataaatcttctttatttccagcatgatctcgtccatcagcctctttaaatggcgctcttgcttgtaatttgtgagcagatacaccttgtgtcattaaatagtcagtcactgagcgatcgaacttagtattatcccacgtaccttctattcctaaaaaagtgactcttaaacttgatgggcaacgtcctaatgccttttgaacagcatcatctatttgttgacttaaatcagaagattcatcagccattgagccacttgtatctattaccacaactaaatctaaagcaacattgccatctcctgtctccatttgtgaacttaaagtagggttagcagatggtggcggaattattggtttagctatttgtttattactatcattatttattaaactattatttgattttccattcatattctcgctccaatatatgcaatattaaaaataaagtgattagcctttttctagcaagaatatattatgattttattttgtttgttcacttccttattaaatataatagatttgttgttttttaatatcccaatattattaacaataattaataaaacaatcactttatttataattagataatcagcccttccgctaatagacattcttaattcttactaacacctatcagtatatctgatagcttatatcaaaaactatgatatgtttgtttttaaaggaaaaattacattttcagccaagttgataagaagcatcaactatactgaaaaataaagataataaatgtacagtattaatttaaaaataatttttatcatcgaaaaatacaaaaaaaacgcctctttatgtattaaaaataaacaacttcagtttaatttatagtgaatcaattgaaaatcattcataataataggcaatttattactttattccccttaaaagaaagtcaccataacaagtggattttcattattattattaaaaaggaaaataacacgtgattgacacacagttgcctttaaccgatttgcaccgccatttagatggaaacatccgtccggaaacaattttagatttagcacaacaacataatattgccctacctgcctatgagctagaaacattgcgcccacatgtgcagataactaaaaatgagcctagcttagtgagcttcttacaaaagctagattggggcgttgctgtactcgccgatttagacgcttgtcgccgtgttgcttatgagaacgtcgtcgatgttgctaatgcaggtattgattacgcagaattacgcttttcaccttactatatggccatgaagcatcaattaccgattgaaggtgttgttgaagcaattattgatggtgtacaaagtgccttacacacttatgatgttgagatccgtttaatcggcatcttaagccgtacttttggtgaaaatgcctgccagcaagaattaaatggtctattaaaacatcaagataaaatcaccgcacttgatttagctggcgatgaattaggtttccctgggcatttattccaacctcactttaaccgtgctcgtgatactggctggaagatcaccgttcatgcaggtgaagcggctggtgctgaaagtatttggcacgcgattaaagaattaggggcaagtcgtattggtcacggtgttaaagccattgaagatccccgtttgatggattatctcgcagagcaccaaattggtattgaatcttgcttaacctcaaatattcaaaccagtactattgcctctttagcacaacatcctcttaagaagttcttagagcacggtattatcgcctcgctcaatactgacgatccggccgtggaaggtattgagttaaaacatgagtatactgttgctgctcctgcggcgggtttaactgcagcacaaattcgccaagcacaaattaatggtcttactatggcttttattagccaagctgaacgtgatgcattaattaaaaaagtgagtttaggttaatattaacgaaaaataccgccttattgctaaggcggtatttttatcttttgctctatttttacagtgactgctgatggtgttttttagcttgattggcataacgctgagctaatatggcacaaaccattaattgaatttgatgaaatagcatcagcggtaatagcatgatccccaccgttgctgcgggaaatagtacatttgccatgggaaccccattcgccaagctctttttcgagccacaaaatacaatcgtgatttcatcagctttattaaagccaagccatcttgcactataaatattaataacaagtacaatagccagtaatacacaactgacaatggtgatagtcaataacgaccaaccgtcaattttatgccaaataccttcaacgacggcttcactaaatgcaacataaaccaccagcaaaatagaagagcgatcggttctattcactaacatcttatgattatcaacccaacggccaattaatggacgagataaatgaccgataataaaaggcaccatcagttgtaataaaatagattgtatcgcccccgcagtatcaaaatgctcagcagagccttgtgtttccattaaaaaacccaccagcacaggggataaaaatacccctaaaatgcttgatgctgatgcactacagattgccgcggctacattaccaccggcaacagaagtaaaggcaatagcggattgtactgtcgcaggtaaagcacaaagatataaaaatcccatataaacggtaggtgacatccagtcaggtaccataaactgtagtcccaaccctagtaatgggaataaaacaaaagtactggcaaaaaccactaaatgtaagcgccaatgaccaagtcctgacaatatcgcttctctagaaagctttgccccatgcaaaaaaaacaataaggcgatcgcagccgtagtgagatgttgaaagatgacttttatctcaccttgcgcaggtaataatgttgcgagtatgaccaccaagatcataatcattaaaaaagagtcaatttttagcttttgccaccaagacatggttttcgtcactccctaatgtttacagcttaattgtggtttttgattgatttgaaaggctaccggcttcaattaaacgcataacattaatggcctgtgacacagtaacaggactctcttcaccaaatgcaatcgcacgataaatttgctgataataagcgggataattacctgatagagtcggtaactttgttgttactacttcaccactctctgtcgataatgttaattcaccctcttgaggatcagccccccagttatacatttccgtcgggagataacccgcttttaatgcatcttcttgggtatctaaaccatattttacataactgcctttggtcccatgaatagcaaaaataggcgtaggtgaggcaaccaacatagaggcatgtaaaataactttcagatgaccatagtctaatagtgtatgaaagtagtcagcatttttagcattagggcgcaactgagcaatatcagcagtgattgcataaggttgaccaaaaagacataccgcttggtctagtaaatgaggggccagatcgtaccaaagtcctccaccaagtccggcatcttcacgccaacgttggcgcacagcgggtctaaaacgatcgaaatgcgcttcataggcactgacttcacctaatgttttatcggcgagtaatttttgaacggtaagaaaaccggcatcccaacgacgattatgaaaaaccgagagtaatctcttagcttctttcgcttgttgtgccaatttttctgcttcatcgagtgtcaaagtaaaaggtttatcgacaacaacatgtttaccgttttttaaggcttgtgaggcgtaggtatagtgagtgttattaggtgttggaataacaattaaatcgatgtctggatcatcaatcagtcgttgtgggttagcatacaccgtaatattaggaaaatcagcgataactttactttcatcagagcttgaaatggctgatagtgttaacccctcagtggtacagatcaggggagcatgaaaggttttacttgcataaccatagcctataatccccacatttaaattttttgtcataaccctatcccgcttttatctttttattctataaatgaaaaatgactttcacttctacagctaaataaataataacaaagtttgtgataatatctcgtttagaacttagtataatagtaggatctttgattaatgaaattaaaacctcagacaaacgttttgccccagcaatcccctaaagcccctattacgggttggttacttgcccctttggcttatttgctgttgtcgatagtgggcttaggtttaatgtctgttttatatttaatacgatatttttcagatttttcgattatccaccagctaccttttcatgtggtatcaagctggtatctttccgtgttaacaacatgggcgatgtttgcatttaccgcttatttattaagacagttcttttaccgcgctaaaaattttcctcgtttatttattatttggttattaattaacttattgttggcgataaaaagtttcggttttgcccctgttgatgatcaaaccgcggttaagtcactattatgggccgttatggcaactgtctgctttgtgccttatatcaaatatgctaagcgtgtccgtgaaactttcacacaagatcgataacttcatacatttcagcttgatattatactcgcccgtttagcctctttattttatgaggctttttctccattttttaacaattttggcatagcaatgactgattacttgcttttattcgttggtaccgtcttggtgaataactttgtactcgtcaaattcctcggtttatgcccatttatgggtgtatcaaaaaaattagaaaccgcgataggaatggggtttgcgacaacgtttgtcatgacgattgcctctattagctcttggctaatggatacctttattttagttcccttagacttactctatttacgtacactcagctttattttagtgattgctgttgtggtgcaatttacagaaatggtcgtaagaaagacgagtccaacgttatatcgtctattggggattttcttacctttaattaccaccaactgtgccgtattaggggtcgcgttactgaatatcaatcaatcacatacctttatgcaatcagcagtatatggttttggtgctgcggtaggattctccttagttatggtgttatttgcagccattagagaaagactggctgtcgccaatattcctgctcctttcaaaggctcttctattggcttaattactgcgggtttaatgtctcttgcctttatgggttttagtggtttggtgaaactgtaatgaattctttatggatagcaattggtgtactgggtgtactagggcttctattcggcctgattttaggttattccgctcgtcgctttaaagtagaagaagatcctattgtggaaaaaattgatgccatattaccacagagtcagtgtggtcagtgtggtcatcctggttgccgcccttatgcagaagcggtagctaataatggagaaatgattaaccgttgtgcaccgggtggtgaacaggttatgttaaaaattgccgaactgatgggggttgatccacaaccacttgacggtgatgaagaagcattaaatccggtgagaaaagtggctttaattgatgaagacaactgcatcgggtgcacaaaatgtattcaagcatgcccagtggatgccatcgtcggcgctactcgtgcaatgcacaccataatagaagatctctgcacagggtgtgatttatgtgttccaccttgtccaacagactgtattactttagttcctgtgaaaatgacgacctctaattggaaatgggatttaaatactatccctgtaagaaatattcctgcagagccagaagaaacacccgaagatgaaccgtcattaaagacggaggataacgctcatgtttaatctcttttcgttatttaaaaaagataaaatttgggattttaaaggcggcattcatcctcccgaaatgaaattacaatcaagtcgcacgcctatgcgtatagcccagttaccggatgaggttaccatccctattcatcaacacttaggtactcctgggcaactttgcgttaaagtgggtgatcatgttttaaaaggccaagccttaactcgtggtgtaggaagaacattacccgttcatgcttctatatcaggtacggtcacggcaatagagccatttccaagcactcacccttctggtctgcctgaaattgcagtgaaaattgtctctgatggtaaagacgaatggcgagaaaaatcaccactagttgactatcaatcacaaagtaaagaagtattgcttacccgtattcatgaagcaggcattgctggattagggggagcgggttttccaacagccacaaaattaaaaggtggtggtgatttagttaaaacgctcatcataaatgccgctgaatgtgagccttatatcacagctgatgacagacttatgcaagagcacgcagatgaagttattgcgggttgtcagatattaatgcatatactgtcaccggatgaagtgctgattggtattgaagataacaaacctgaagctattgccgccttaaaacaagcattagcagcactcacaaatgaaaaacgtatttttattcgggtgatccctaccaaatatccatctggaggcgctaaacagttaaccaaaatattaacgggcaaagaagttccttctggcggtcgctcctctgatattggcgtattaatgcaaaatgtggggacggtagtggcaattaaacgtgccattatcgatgatgaacctttaattgaacgtgtcgtcaccgtaactggacaaggggctaaaaccccaggtaacttttgggcacgtttaggtactcctatttatgcacttataaaacaagcaggctttgttgctggctctgagcagatggtcattatgggggggcctttaatgggcttcaccttacctgacttaaatgcccccgttataaaaattactaactgcttattaattccctctccagaagagatggatacagataatattgaagaagcctgtatccgttgtggtcaatgtgttgacgcctgccctagtggtttactaccacaacaactttactggtttagtaaagggaaagagcatgagaaagcgcaacaacataatttatttgactgcattgagtgcggggcttgtgcttttgtctgccctagtaatattccattagtgcaatattaccgccaagaaaaagcagaaatacgagaaattgatgcggaagctaagcgagcggctgaagctaaggctcgctttgaagcgaaaaaaatccgtatggaacgagaaaagcttgaacgtgaggcaagacatcaacgtgctgcagttaagcttgatgatcaccaacaaaatgaagtgcaatctgcactttctcgtgtaaaagaaaaacatagcattggcaaaattattgctgttaaagcaggagaacaacctgacaacgcagcggctattgctgcacgcaaaaaacgtaaagaagaagcccgagcaaaacaagctgctaaattggcacaacaggtaccacaaaatacccataccaccgccgatgcagaaagtgatccgcgcaaagccgctgtagcggcagcattagctcgtgtaaaagctaagaaagctcaacaagcgcaagcaactacaaaagtagacactcctgctgaaactcaggctgaggtggaaaccgatccacgcaaagccgctgtagcggcagcattggcccgcgtaaaagctaagaaggctcaacaagcgcaagcaaccgcaaaagtagacacacctactgaaactcctgctgatgctgagctggaaatcgatccgcgtaaagctgctgtggctgctgctattgctcgggtaaaagctaaaaaatcccagcaagcgcaagcaactgcaaaagtagacactcctgctgaaactcaggctgaggtggaaaccgatccgcgcaaagctgctgtaaccgcagcattggctcgggtaaaagctaagaaggctcaacaagcacaggcaactgcaaaagtagacacacctactgaaactcctgctgatgctgagctggaaatcgatccgcgtaaagctgctgtggctgctgctattgctcgggtaaaagctaaaaaatcccagcaaacgcaagcaaccgcaaaagtagacacacccgctgaatctccggctgaggtggaaaccgatccacgtaaagctgctgtggctgctgctattgcccgcgtaaaagctaaaaaatctcaacaagcacaggcaactgcaaaagtagacacacccgctgaaactccagctgatgctgaggtggaaaccgatccacgtaaagctgctgtcgccgctgctattgctcgggtaaaagctaaaaaagaagcacagcaacgccatgctaaagaagaagtgacattggattaatacaaatgaaatttagaccaatacaaaataacaatagcaaattgaaaatcgccagctctccatttactcataatcaacaatccaccagtcaagtgatgttgtgggtaatattggccgctattccaggtattctatgccaactctacttctttggtttagggacgctatatcaaatcatcttggcaatcattgtcgcgctattggcggagactatttgtgtcaaactcagaaaagaagatccacttctatacctaaaagataattccgctttactaacaggtattttactagcaattagtattcctcctttagcgccttggtggataattgttttagggacattttttgcggttgttattgccaaacatatttatggcggattaggtcaaaacccatttaatcccgcgatggtcggttatgtggtgctattgatctcctttcctgtacaaatgacatcatggatgccccccattgaattacaagccgtatcttataactttatagatagcttaagtattttctttaccggacatacaccctcaggactcacccttgaagatttaaggcgctctgtagatggcattacccaagccacaccacttgatagttttaaaaccggattattaacccactctattgatgaagtattagcaacgccaatcttacaaggtggatttgcgggaatgggttggcaatgggtgaatgttgcctatctggttgggggcgttatcttgttatataaacgaattattagctggcaaattcctgttgccatgttaacgctgcttggtgtttgttcactgatcagttgggggatcgatgctactcgttactctcagccactattacagcttttctcaggtgcgacgatgttaggggctttctttattgccaccgatcctgttagcgcctccaccacaccaaaagggcgattaatctatggtgcaatcattggcctattagtgtggattattcgtgtctatggtggctatcctgatgccgtggccttctcagtcctattagctaatattgctgtaccgcttattgatagttatacccgtcctcgggtttatggacattaatggagataatgatgatcgagatactaaaacgtcatgggttaacattagctatctttgcggcctgtaccacagggttaacggctgtcgtctatcacttgacggcgaatactatcgcagaacaagcggctttagaaaaacagaaattattagaccaagtgatcccaacctctctctacaataaccatctcgcgcaagattgttatattttgacagataaagcattaggtaatgaaaaaccacataaactttatgttgctcgttttaatggtaaacctgtcgccgccgcattagaatcaacggcacctgacggttattcaggggcgattgaattattggttggtgctgattttagtggcaaagtactcggtgttcgcgtgacaacacataatgaaacaccggggctaggtgataaaatagaaacgcgtatttcagattggatttactcattaagtaacaagtttattaccagtgctcatgactcacattgggcggtaaaaaaagatggtggtgattttgaccaattcactggagcaactatcacaccaagagccgtcgttaatgcatcaaaacgcactgcatggttaatacaatctttacctgaaaaattagataccctttcagcttgtgaggcgaattaaaatgagtatgatcaaagaactgttttcacaaggattatggaagaataactctgctttagttcaattattagggctgtgcccattactggcagtgtcttctaccgcgaccaatgctttaggcttaggtctagccacaacattagtattagtttgtaccaatgtggcagtgtctagtttacgtcgttgggttccctctgaaattcgtattccaatttatgttatgattatcgcatccgttgttagtgcggtacaattgcttatcaatgcctatgcttatggtttataccaatcgttaggaatatttattcctcttattgtcactaactgtattgtgattggtcgtgcagaggcgtttgcagctaaaaatgaagttttcccttcagcaattgatggctttgctatgggattaggtgcaacagcggcactttttgttttaggggcaatgcgtgaaatattaggtaatggcactttatttgatggtgctgatttattattaggtgaatgggcgcaagtattaagggttgagatagtacatttagactcacctttcttactggctattttaccacccggtgcctttattggtttaggttttatgctggccataaaatacctgattgatgaaaaacagaaaaaacgcgttccatccacgaccaaaacctatgaaaaagaacaaggttgtggcagtcatattgttaaaaactaatttgtgagcataatgaatcaagctaaacgtatagaaattttaactaggttgcgggataacaatccgcatcctactactgagttaagatttaactccccgtttgaattattgatctccgtgttactctctgcacaagccaccgatgttagtgttaataaggcaacagcaaaactttaccctgttgccaatacaccccaagcaatgctggaattaggtgttgaggggatcaaatcctatattaagaccattggcctatttaatacaaaagctgagaatgtgattaaaacctgccaaatattggtagataaacatcatggccaagttcctgaaaatagagaggctttagaggcattacccggtgtcggtcgtaaaacagcgaatgtcgtacttaacaccgcttttggttggccgaccattgctgttgatacacatatctttcgcgtgtgtaatcgcactaaatttgcaccgggaaaaaatgttaatgaagtggaacaaaaactgctaaaagtggtaccggcagaatttaaagtcgattgccaccattggcttatcctgcatggtcgttatacctgtattgccagaaaaccacggtgtggctcttgtattattgaagatctctgtgagtataccgaaaaaacagatccacaataacattgtgcaaatttctctgtttttctgatgcatattacttgcgtcattacacacaatcgaataaaactattgcccacttttattattaaaattgccgactttccggaaaaatatgtttcaagacaatccgctgcttgctcagctaaaacagcaactccatgcccaaacaccgcgcgtggaaggccttgtaaaagggacagataaaggctttggcttccttgaagttgatggtcagaaaagctattttatccctcctcctcaaatgaaaaaagtgatgcacggtgatcgcattattgctgccgtacatactaataatgataaagagtccgctgagcctgaagagctggtagaaccctttttgactcgctttgtcggccgtgttcagaaaaaagaaggtgataatcgtctatggattattcctgatcaccctctactcaaagatgccattccttgtcgtcctataaaaagcttaacgcatccatttgccgatcaagattgggcagtggcggaaatgcgccgacatcctcttaaaggtgataaacattttcaagctgaattaactgattttattaccgataaagatgaccattttgcaccttggtgggtgacattaatgcgtcatcaattagagcgaaatgcacctgaagtagacagtgaaacattaaccttacatgatgatctaccgcgtgaagatttaaccgcgctctcctttgtgaccatcgatagtgcttcaaccgaagatatggacgatgcgttatatattcgtaaagaagaaaatggccaactttcactgtatatcgctattgccgatccaacggcttatattcagcctaatagtgaattagataccattgcagcacaacgagcgctaacaaactatctaccgggctttaatatcccgatgttacctcgtgagctatcagataatctctgctcattgcgccctaatgaaaaacgtcctgcgttagtctgccaagtgggtatcatggaggatggtgcattaaccgatgagatccacttctactcagcatgggtagaatcaaaagcaaaactggtttatgacaatatttctgattggctagaaggtgaagaaacacagtgggcacctgaaaatgagattgttcatgaacaagtcatgctattaaaagagatgagcgagaaacgtcatgtatggcgtgaacaacatgctctcgtctttaaagagcgtcctgactatcgctttattcttgatgacagtggcaacgtattagatatcgtggcggaaaaacgtcgtactgccaaccgtatcgtggaagaagcgatgatcaccgccaatatttgtgcggcaaaggtacttagtcgcaatctcggttttggtatttataacgttcatactggttttgatccgctctatattgatcaagtctcacaaaccttaaaagagcacggtattgaaaccaacgcagatgagttattaacccttgaaggtttctgtcgcttacgtcgtgaactggataatcagccaaaccaattccttgatagccgtattcgtcgtttccaaaacttcgctgaaataaaaacagagccaggtcctcactttggtttaggccttgaagcttatgcgacatggacatcaccgatccgtaaatacagtgatattttaaatcaccgtttattaaaagcgattatcagcaaaagtgcggcagaaaaaccgcaagatgaagattgtgttcgtattgccgaacgtcgtcgtgctaaccgtatggccgagcgcgatgtcggtgattggttatatgcgcgcttcttaaaaccttttgctggcactgagagtacctttaatgccgaaattattgatattactcgtggtggtattcgggtacgtttagttgaaaatggggctattgcctttattcctgcaccatttttacatgcggtacgtgacgaaattcaatgtagtcaagaaactggctctgtcattattaaaggtgaaacagcctataagctcaacgacattattccggtacgtattgaagatgtgaaactagaaacgcgtaatattgttgctcgtccgatttaacagctatttagcgtaatagatattatcaagctgataacctactcaggttatcagcttttttatttattgcattttgcgactctacagatatataaagtgacactgtcaccactaaaactagtttgctaataataaaaatgcgccgaccttcaacaagataagcgcactatatgtagaatactaggcttcaatcgatgattggggttgtgataaagaactaccttagcctccggccaatttcactttcatccctttcgcttctaataaagatttaattaaatcccgtttatcaccttggatttcaattaatccctctttaacactgccaccacaaccacatttcttttttaattcagccgctaatttagccagagctgcatcatccaaatcaataccggagataacacaaacacccttacctttacggccactggtttgacgttggatacgcacaataccatcaccggcggggcgtgtaggtttctgctcttcttctttaatccgaccaatatcagtggaataaaccagccgagaattattatccatgttgcacaacaccttgtatagaacgattaatttgctgtaaagtttccagtggattttcactgcgtgtaataggtctgccgatcaccatataatccaccccagccactatcgcttgctctggcgtcataactcgacgctgatcacccacttcgctccccgcgggtcgaattccgggagtgaccaataaaaagtcatcaccacacacttgtttaaaacgagtggcttcatgggccgaacataccacaccatcaagaccacaggctttagccagtaatgctaagcgttcggcttgttctgctggagttaggttaatgcccaattcagtgagatcggattgatccatactggtcaacacagtgacagcggttaatagcggtgcctctttgccaaatgatcttaagctctcctttgccgcacgcatcatacgactaccaccactcgcatgcacatttaccatccatacccctaaatcggcagccgcggcaactgctctcgccaccgtattgggtatatcatgaaattttaaatctaagaaaatatcaaacccttgctgttgcaattgcgttacaaattgcggtccaaagcgagtaaacatctctttaccaattttaaggcgacaagatgaagggtcgataagttgtgcaaaatcgagtgcacttttttggtcttcatagtctagtgccacaataacgggcgcgcaggtagagctgggcgattttttatcacaatcaaatgacattttaaggcctttatttatcaagagactattaaaagtgacatcgtcactgaccatctaagccacgtatcggcttaacggtatcccaagagcgacaggatggacaatgccaatataatgcatgggaggtaaaaccacatttatggcaacggtaatcaggttttgtgcggatctgctcaccgaccatataacgtaataagatcaggctctcttttgcgcgtccttcttctgcttcagctaaatgatagcgcattaaacgatagaaaagtcgcatggtaggatgacgttctagttggcgattaatatataactgtgcagcttcaatgccctctttctcttcaataatatcggcaagataaagctctgcaatggcaccacaattactctcgacacattgacgtagataggcttcccaacgtgcaggatcaccttgagattggaagcattcaaaaagcattggcaaggtttcactgaccatctctttatcttgctcaattactttcattaatacatcaatggctttatttttttcatcgcgcgcgatatagatacgaccatacataatggaaacacgggcacaaagtggatccatttgcccggctttttgtagaaaacttagcgcattatcaagattatcactgctcatttcttgcaatgcgagttcacaatagaaatgggcaatttgctctttaagttcatgttgacccagttttaccaatttctctgcggtttctatcgccttaccccagtcactggtaagttgataaatggctaggagggattgtaatgcactttgacgaaaatcctgctcatcaatcagctgtaaaaacatatgttcagcgcgatcataaacccctgctgcgacataatcacggccaagttgctgaatagcgagaagacgttgttcaaaagagagtgccgcgctctccattaacgattggtgaatacgaatcgcacgttcaacttcaccacgagagcgaaatagattacctaaagtaagatgtgcttcaaaggctgagctatcctctttaagcatttcaaggaacagatcaaccgctttgtcttgttgatcagaaagtaaaaagttaacccctgccacatattcacgtgacaggcgatcggcattttgctgtttatcctgttgcgcaccacgacgccccatataccagccataagccgcagcgaccggtaataacagaaacagcaactcaagcatctattctcgtccttattttacagtagaaacggctgtagaacgattttcttggctttcttgtttggtttgttcactttcaaggcgcttaattttacgctttgctcttactaatgataaacgtactcgcaagtaaaaaacgccactgacgatccagcccagtacaaaaccaacaccaaacagcgtggctaataaagtagagatacgatattcaccttgagcaataagataattgaaggtgatcacctgatcattatttgaacctaacgtcatggctattacgacaatagctagcaccagaacaaccaaaataaaaagtagaactttcttcacattatttcctttttattctcttttctttggataagggataaaggtagcattttcaccactcacaaagaaagtcatttcttagaatcatctgattttcgtatattttttcacataaatagtgaaaaataaattcgctatctcaaaaagaaaaacgattatcaaggttttaacaacaatcgtcgttcaatcatccaaaatgcacaccacaccaacacagcactaatcagaataccgacaatcacatcagatgcccagtgcatacctaatattattcgtccgacagtcacatcaataccccataatatccctaagctggctaaaaaataatgacgtcgtaacatacacagcacaaacacaaataaagccagtgttgcagagaataagctgtgtccagaaggaaaggcataaccggtttctgctcgccaatggcttaattgccattgagggatcagcgacgaatgagataatccattatgcaacagttgctcacgctcaggacgagacacttggtaaaaatgttctggtgatattgatagttggttactgacccaaaccacataaggtcgtggctctttaacgctattttttacagccactttgatcaactgccccaacatcaaagtcgcgaccataataattgctaactgaataaatgcttttttaggtagtttaagaataaaaaagagcaaaacaaggcaaagtaatatagttaaagctccccaaggtttagccgcactattggctatccataaagtgctttcgcctcccagaggatgtgctgatggttgccattgccatcccagaataagcaccacaataggtacaatcaaaagcaatccacttcctaaaagcatcaatactgatatttgcttattcaatctatttgtccttatctattctgtatgcactgtttttatttactgatgattaactgatataaatgattagtataaacaataccagtttagcaataaataattatgcaagtaggcttaaaatctgataatttgtttaggtgtgatttattaagtgtgtgttatcaaattccctgccgatttagacaaggaaccatttcagtgttttatttctctttgtcctcgttataaagtgtataatcttgaacgagagtatcacctgaaattatgagtcaaaaataatgaaattaagacgtatcgcagaagcaaaactccctactccttttggtgagtttttaatggtgggttttgaagaaattgccacaggaaaagatcatgttgccctcgtttttggtgacatttctggcacaaaacccgttttatcccgtattcattctgaatgtttaactggcgatgcactatttagcctgcgttgtgattgtggttttcagctagaagctgccctttcacaaattagcaaagaaggccgtggtgtattactttatcatcgccaagaaggtcgcaatattggtttacttaataaaatccgcgcttatgcattacaagaccaaggattagatactgtcgaagctaatctaaagttaggatttaaagctgatgagcgtgacttcaccctttgcgctgatatgtataatctattaggcatacatgaagtacgattattaaccaataatccaaagaaaatcgaaataatgaaagaagctgggatcaacgtggtagagcgtgttccattaatcgtaggacgtaatccaagtaatgctcattatcttgatactaaagcggataaaatgggacatatgttatttaaaaaagcgcaataacataaatatcggatagattatcagcgttattattcaatccgggtgatttagcccggattttattttcctgcacttacccccatcaagctactgactattttcaagatgatttttttatcctttaattattaaattatatcatgtgaaattttatcatatggcaagctgttgactctttaactggctttaagctatttataactaaataatttttaataggaatagcataatgccattacatttttctggtaggatttttgcgtctcttttattagctgggacactattaacaggttgcgataacaatgataacaaccgttatgcaattaaagtgggggtgattaatggtgcagagcaagatgtggcagaagtcgctaaaaaagtggctaaagaaaaatatggtttagaggttgagctggtgggttttagtggctcattgttacctaacgatcccactgcaaacaaagaattagatgccaatgtgttccaacatcgccctttccttgagcaagataatcgttctcgtggttataacctcgtcgcggtaggcaatacctttgtttttcctatggcaggttattcaaccaaaattaaacatcctcaagaattaaaacccggtgatacaatagcactgcccaatgatccaaccaacttggggcgcgcattattattgctacaaaaagagaaactgatcaccttaaaccctgacagtggcctattacccacaacactcgatattattgataatccacttaaattaaatattatgcaattagaaggtgcgcaactaccacgagtattaaacgatccccaagtaacagttgcgataattagcacaacttatatccaacaaattaatttatcaccaaccaaagacagtatttttattgaagataaaagttcaccttatactaatattattgttacaagagaagataataaagaagcagagaatgtacgcgattttattaaagcctatcagtcacccgaagtggcaacagccgctgagactatttttaaaggtggtgctattcaagggtggtaaacacgacttataatttatcaggtcacttataataagtgacctatttattaatagttatgacccaaaataaaactttaatttattattttcatctgctttaattgatacttgaagatcattaccatattgatcatatataatacaattcatttcttcatctttcctactggatgtaaacgcttttccatattctatactatagctccagaaacataccccatcctcatcatttgctgatgtgaccggaattaaagtatctggtttaaaatggaattccttagtgtaataatgaggctttaatggaatttttttaatatatttatcagtcgatgtgctaataatctgataatgacctttttgaaaataatgaaaagatttattttcttcatactctacactcttagttatcgttctattattaccgttaaaccttagataatatttcgtcaagacatcacctgatgtttctacatctttttctattctaggatttaccagcggttctatgtctacatctgcttctgtaaatattttttttggtgcaacgtccagaatgataaaatttaaataatcactgtaattatttttaaaggctgtagtatactcttttcctttaatgtgagtctgtgcacaaattctaaaggtatctatcactttattaacagaaagataaataacacaagtagatgcatcaggggagttcaatgttgcttcttcactgcttggaaatacaaatccattttctttatcagataaagaaatatcattgcggtcaataggaagatttttttcatttacaatatgtgtatttctataaatatcttctttggctatttttatgatacgaccatttttatctaaagcctctatataaatagtaataggtacctgatgtctaccattaacatatgcagtcgctgtactgttatatctattaatataaatataaaatgctcttagttcatcaatatcatcccaagagccaaattggctcttaataacctcacctttcgatacaattgtatttccctcaacagtcgcataaccagtcacccaaccatttttttcaactattgcatcaccacgaacaatagcatattctgatactttagcattatctttaataacagcattatcatatattacagcatcgtcagatattctcgcattatctttaataactgcattatcatatattacaacatcatcagatattgtcacattatcttccactagcacattaccataaatctctgcattgtcttttactttactatttcccttaactattgcattaccgtagatcttcacattatttcttataattgcattatctgtgactttagcattaccaaataccattacattatcaaaaataaaacaattatcatctctacttaaattactttcattttctatccatcctcctggactatctgtatacactcttctaattctatataaagtaacaccattatattcttttgtttcactcgttattttatatttcttcataaacacctccataataacaccctgttaatattgttatattaacttgatactcattaaaaatacgtttagcatttaatggttagtttatagtattagatgaaatcatttgtcgatattatgaaatataaaaatattctattataaaaaagaaagcgaagaattaattcatcattcttcgccaactaattaatacttactaaattattttacaacatattacgaataacataatgcaagatcccgccatgttcaaaataagccagctcagtttgcgtatcaatacgacaacgagccataatagtttcttggcgaccatctgcaaaagtaatattgacagcgacatcttgacccggtgttagcgaattaagccccgttatctcaattttttcatcacctttgagccctaaagtctggcgtgatacaccgttaggaaattctaaaggtaatactcccataccaatcaaattagaacggtgaatacgttcaaacgatccggctatcaccactcgcacacctaataatcgtgtacctttggcggcccagtcacggctagagcctgatccatattcattaccggcaataatggctaaaggcgtattttcttgctgataacgcatcgccgcatcataaatggctaacgtttctcccgttggaatatgttttgtaaagcccccttcgatccccggcaccatttcattacgaatacggatatttgcaaaagttcctcgcatcataacttcgtgattaccacgtcttgaaccgtaagagttaaagtcttttggttcaacaccatgctctcgaagataacgcccagcagggctatcggctttaatattcccagcaggtgaaatatgatcggtggtcaccgagtcacctaatatggctaaaatactggcttggtgaatatctttaatcgcctctggtgtttttgtcataccttcaaaaaaaggaggatggcgaatataggtagaatcaggttgccaagcatatacaggggtatcttgtatttttagtgattgccaagtttcatcaccatcaaataccgcagaatactctttatggaacatctgcgtttttactttttccaccgcatcggcaatggctttactgtcaggccaaatatcttttaaatagactggattgccctgcttatcttcacctaatggctctttggtcaaatcaatattcatattaccagatagcgcataagccacgactaaaggaggggaagcaagccagttggttttcactaaaggatggatacgaccttcaaagttacgattacccgatagtacagcggctatagttaaatcattatctttaatcgcctcttcaatcggggctaataaaggccctgagttaccaatacatgtggtacaaccataaccaaccaaattaaaaccaagtttatctaaataaggtgttaatcccgccagtgctaagtagtcagtcaccactttagagccgggggctagcgacgatttgacccatggcttacgctgcaggcctttttctaccgcatttttagccagtagacctgcggccattaaaacattagggttagaggtattggtacatgaggtgatcgctgcaattactaccgcaccatccgttaaggtaaaaggtggctgattatcaatggtgacctgaggatattgagcaagaggttttttatttgtttcaagctctactgcagctttaaatgcttttggtacattcagcaaattaactctatcttgtggacgtttagggccagcaagacttgcttccacagtacccatatctaacgataaggttgaggtgaaaatgggttcatcaccggcatgacgccataagccttgctctttactataggcttcaactaatgcaatttcttgctcttcacgcccagtaagacgtaaataatctagtgtaatttcgtcaataggaaagaagccacaggttgcaccatattcaggtgacatattggcaatcgtcgctcggtcagcaagaggcaaagaagctagtccatcaccataaaactcaacaaatttccctaccacaccatgttgacgtaacatttgcgttacggttaatactaggtcagtcgctgtgatcccctcacgtagtttacccgttaacttaaaacctaccacatcagggatcagcattgagatcggttggcctaacatcgcagcttccgcctcaatgccaccaacgccccaacccaacacgcccagaccattgatcatagtagtatgtgaatcggttccaaccaaagtatcagggtaagcaatatgtcggccattttgttgttcagaccatatcgctttacctaaatattctaagttaacctgatggcaaatgcccgttccaggaggtactacacgaaaacgttcaaacgactgttgcccccaacgtaaaaagagataacgctcatagttacgctgcatttcaatttcaacgtttttctcaaaagcatcatcactggcatatttatcaaccatcaccgaatggtcgataaccaagtcaacaggagaaagtggattaactttttctacatttccccccaaagattttacggcttcacgcatagcggctaaatcaacaacggcaggtacacccgtaaaatcttgcattaatactcttgctgggcgataggcaatttcacgggaggcgtgggcatttttttgccaatccaccaatgccttaatatcatcttcaacaaccgtatcatcatcaagatagcggactaaattttctagcagaacctttaacgatttagggagacgagtgatatcccctaattgacgagcaacttcagaaagacggtaatactcatattgatgagtacctacagagagagtagaaagactctcctttttcagacgtaacgacatagctcctctccttcttatttttatgctgacagcaatcacaaactatcaaaataggtaaggttatctattaaccatatcatagaaagagaaatttcgcttacggaccacacgatttgttaatatgatgttattgagattatattactaacaaaacttaatctctttcttttaacttaattaggatttaatgggggtattattgcaaataaaggataatgtatatgaacaatcaacaagccgaacaactaaaaaagattatgatggctgatagttattttgcacaacctattacgcccccttttccacagcctttagcaataaaatcattacaacagacacttaatatcaaagatacagaaggacttgttcaatttattatcgcttcacctaaacgttttaacgaatcagaaaaaatgatcatgacacaactgaaagatatacaaattgccttaatctctattatgtcgaatcatctttcagtattgaaaaaagaagatagtgaagcttattatcaaccagagcattggctagaaacccttaatcatttacctttgcttagccgtaataaagttgaaagcaaacgacttgataagcaaacatttgatttttcaattgctcaagcctttgtgcaactgttattaggtgcagccattaatgcagcgtcaccgtcattagccgagtttatcgattttttacgcaatcagggacaacaaattgaactaggaatacgccaatcctttgatagctataaaacgataactattgcaggtgtgacggaaatccttaatcataataatcagcttatttttgtacctaaattaaaaataatgagtctacgtttctcacatcgaacagccaaaatgttattagccagttgttcggggcgaaaatttacgatttcagtagaatacacaacaatcacctcaatttttgatattggtgcacttaatgatccgctgattaatcgacaattttatgcttttttaaataagtttcgtcagttgagtattactcaatctgattcattttttagtggggactttttattgcaatagcattaatgttataagttacataatggtaaaaggcgggataatatacccgcctttgcgtattaaactaaaggtaactcgatatctttaaataactcttcaatttcttcattggtgcgtaaagctgtcgcttgttccaccaaattacgtgttagatgtggggcaaaacgccacataaagtcatacatataaccgcgtaaaaaaccactacgtcgaaatgcaatttttgtggtgctataactaaatttatcacgcatatcaatagcgactaaatcgctatcaagcatcggatcaaatgccatactcgcaatcacaccaatacctaagtgtagcctgacataagtttttattacatccgcatccgttgcagtaaaaacaattttaggctttaaacccactttaccaaaggcttcgtcaagatcagaacgcccagtaaaaccatgggtataagtaacgatatcgtaagttgcaagctcttgtaaggtaacttcacgcttttgcgccaatgggtgatctttagttaccaccacaatacgattccaacgataacaaggtaacatcactaaatcgttatacagatgtagtgattctgtcgctatagcaaaatcacttttaccacggcaaacatcttctgcaatttgtgtcggtgaaccctgattcatatgtaatgacacttcgggataacgttctataaaacctttaatcacagggggtaaaacataacgcgcttgtgtatgagtggtggcaatagaaagcgaaccgcgatcaggataagtgtgttcccctgcagccgagcggatagcttctgttttggataatatctcacgagataatctgacaatttcttcccccgctggcgtcacatgtgttaagtgcttaccactgcgagagaatatttgtatacccaactcatcttctagcatacgaatttgtttactgatccccggctgagaggtatataaacgctctgctgtcgttgagacgtttaaatcgttattcaccacttcaacgatataacgcaactgttgtaatttcatagaagcacgatccctttacaaaagacttattattctgttattccgctcatattcatataactaaaaagaataataaataagcaatatataaccactatatcacttatttcatttcggtctaacgtaattaataaggttatttaggttttattatatcgaatagttataagctataaaaatcggtagaaatcttgctgtctctggatggtcttgattgtattgtgataataacaatttactgattcgatttgctgttaaaaccactgtactattgcctagtaagcgttggaaagtacagtaaacggtcaggagcaacagaatcatatttaacgtaatgtacatacatagaagatgatcaccatcgaaggttagctcatatcaaataaatctataagattgcatagttaaattaatagttgaattagaatagtaacctattgattaatcaatatatctaacaaaagaagtaaacgatttctcatcactattctcgattatttcattaaaactaacccttccagtataaatagaaaaggtcggttctttaatactcccattaggaaaaataactttttcatcttttgagatagtcgtggttagtttaggctcaactttataattaaaataaatttctccatttgatttattagatagttttttctcaccttccgtgattgatggtgaataatagatagattgatcatcttcttccactataacaggggctaatgtagtaaatagttctatttttgaatgtttgttatcgacaattgggataaccttactaatcaccatatgatttttataaatggtagagattggcgctagttctatttttatcaatttccaattacaccatcctcccccatcgataggcacggtataggtcgcgtttttattatcctctgctattttacgttctacctccactttttgtgttaaagaggagtaagagacttcggtataatcagcattaaaatgagaacgttggcatttatttgacgtataagtacctcggacttgcactactgtttcaggggaaatagttgaataaaccgtgattttattgccatcattattcatattgacggggaatttattatcaagatatatattgataagcccactacaaccacctaacaatagataaggaataagaacaaataatttaatcattgtcattagcatagttaatccccattcaactccgttcacctgcttaaaatcgcaatcgcatatcccttcttacactttagacagcaaaaaactacttactcccccaaacagattaatcaatcaatatatctaacaaaagaagtaaacgctttttcatcactattctcgattatttcattaaaaccaatcattttactataagtcgaaccactcagtgttttaatattgccgttagggaaaatagctttattatcctttgagatagtcgtagttagtttaggttcaactttataattaaaataaatttttccatttaatttattggataaactcttttcaccttctattcttgatagtgaataatagattgattggccattttcactttcaatcattataggagctattgttgtaaataattctactctcgaatattcactattaacaataggaaaaacaagagtgctaattctatcttgtttgtatttcaccgatattggtgctatatctatttctttcaacttccaattacaccatccccctccatcaataggcacgatataggtcgcgtttttattatcctctgctattttacgctctacctccacttgttgcgttaaagaggaataagtgactttagtataagaagcattaaaatgagaacgttcacacttatttgacgtataagtaccaataacttccactactgtttcaggggaaatagttgaataaaccgtgatttttttgccatcattattcatattgacaggaaatttattatcaagatatatattgatatactcaccacatccacttaataatagataagggataaaaataagtgatttaatcattgtcattaacatagttaatcccattcaactccattcacctgcttaaaatcgcaatcgcatatcccttcttacactttagacagcaaaaaactacttactcccccaaacagattaatcaatcaatatatctaacaaaagaagtaaacgctttttcatcactattctcgattatttcattaaaactaatcattccagtataaatagaaaaggttggatctttaatgctcccattaggataaataactttttcatcttttgagatagtcgtggttagtttaggttcaactttataattaaaatagatttctccatctgatttattggataactttcgttcaccttccgtgcttgatggtgaataatagatggattgctcattcttgccttctactataataggggctaatgtggtaaatagttctatttttgaatgcttatcatcggtgattggaataacttcactaattcgcatatatcttttgtgaatggtagaaactggtgataattctatttttactaacttccaattacaccatccccctccatcaataggcacgatataggtcgcggttttattatcctctgctattttacgctctacctctactttttgtgttaaagaggagtaagagacttcggtataatcagaattaaaatgagaacgttcacacttattagatgtataagtacctcggacttgcactaccatttcagggtaaatagttgaataaaccgtgatttttttgccatcattattcatattgacggggaatttattatccagatatatattgatatactcaccacatccacttaataatagataaggaataaaaataagtgatttaattattgtcattagcatagttaatccccattcaactccgttcacctgcttaaaatcgcaatcgcatatcccttcttacactttagacagcaaaaaaccactcactctcccaaacagattaatcaatcaatatatcgaacaaaagaagtaaacgccttttcatcactattctcgattatttcattaaaaccaatcaatttactataagtcgatccgctcagtattttaatattgccgttagggaaaatagctttgttatcctttgagatagtcgtggttagtttaggttcaactttataattaaaatagatttccccacttgatttattggataacttttgttcatcttccattattgatgatgtgtaatagatggattgttcatctttttcttccactataacaggggctaatgtagcaaataattttatttttgaatgttcactattagtcaatgaaaaaaccatattccttgtaacaaatacctcatatttactagagactggtgctatatctatttttactaacttccaattacaccatccccctccatcaataggtacgatataggtcgcggttttattatcctctgctattttacgctctacctccactttttttgttaaagaggaataagtgacttcggtataatcagcactaaaatgagaacgttcgcacttattagatgtataagtaccaataacttccactactgtttcaggggaaatagttgaataaaccgtgatttttttgccatcattattcatattgacggggaatttattattaagatatatattgatatactcgccacatccacttaataatagataagggataaaaataagtgatttaatcattgtcattagcatagttaatccccattcaactccattcacctgcttaaaatcgcaatcgcatatcccttcttacactttagacagcaaaaaactacttactcccccaaacagattaatcaatcaatatatctcacaaaagaagtaaacgctttttcatcactattctcgattatttcattgaaattaattattctgctataactagatccgtccaatattttaatattgccgttagggaaaatagctttgttatcatttgagatgatagtcgtggttaatttaggttcaactttataattaaaataaatttctccatctgatttattggataatttttgttcatcctccattattgatgatgagtaatagatggactgttcatccttttcttccactataacaggggctaatgtagcaaataattttatttttgaatgttcactattagtcaatgaaaaaaccatatttcttctaacaagcacttcatatttagtagataatggtgctatctctatttctactagcttccaattacaccatcctcccccatcgataggcacggtataggtcgcgtttttattatcctctgctattttacgttctgcttccacttgttgtgttaaagaggaataagtgacttcagtataagaagcattaaaatgagaacgttggcatttatttgacgtatacgtaccgcgaacaagtactaccgtttcaggggaaatagttgaataaaccgtgatttttttgccatcattattcatattgacaggaaatttattatcaagatatatattgatatactcaccacatccacttaataatagataagggataaaaataagtgatttaattattgtcattagcatatttgaaccttttcagcgccgttataccttctggcataagtaatgtgggtaataatgtatctgcaaccataagatctaagtctagcaaataactgctttcatcgtatttggcttgtgatagtcttttttgattgaccaattctgctctaatatcatatgcagattctgttaatccgttatatttaactaaactaattattttagaaataataaagtttgtatatttacgacttgagtggtctccaccaccagttacaccaggtgatgctgttttgggtaacttatatagttcaaaaaattcttgtttaagccgatgatcgggtagtaattcagaaacgagatagagcttttcatcagtatcagagacgagatagcgttttttatctatttccatatttaccaaaagacttggtgcatatccaacacttgccaacacgtatttatacatagatgtttttgatgttggtttgtaaaaatgcacagcatcaccatggtgaataaatgtatcactttttatattgaaatttgttttcaattgatcaatagctttactcgccataccttgatgtttccagtctatatatgttattgcaatttctatagaataccctaaccaatcatgatcacttataaaagcgatattattcatatctttttcaaaaggaagggctggtactggatcgtcttcattgacatgacgatgatgaataatatctcccaactgctctgtaatagaaagggttaatacccgaggcataccaatagtataaagcactggattatattctcttaattttatggcatgtaataaagctaatgccccccctagactatgccctgcgataaataattttcggtttgaagctaaacctttgattaaatttaatggattttcatcatcattctttgaacctattttcggccttaatttatacttaccatccatggtcctaaatgaattataaaaaccagagtgtacatagccttctattcccatatcctgccgcagtttaactggtttaaattttatatctgtaaatatatcagtttttcctgccgttcctcgccaaacaacaataacttccttattatttgcgatataaaacatttgggtatctaaattcttagctgaatcaataaactcaacatctgtatagcgttcactaaacggaacatcatatattatcggggtaaaagattctttcgcaaattgctgtgggatttgggataagtcaaagagttgattaaaaaaaacgtcctcaattgagcctaaataatttcctgcattaggctccttatcattattagctttaaagctcgcataagacaatacagataatatacttaaattacaggcattagtaattgagtaatctttctgatgatgtaataagaatgaccaggctctaaatggacatacttcaaaaacccaacgttcattacgaaatattaccatatatccattgggttgctgttttttaaaatgatatttaggtaactctggttgatcccattttaaaattttaggcgtcgcatcacataaatcaccaatagttaaatagcggtaattatcattacgttgtgttgcatcatagcgaattttggaagaaccatttctgcgtactcttaaaggacgtttttccatttcatcagccagcatttgtgcattaatagaaaagcgcccccctgttggcggtaaatctgtttctctaacaatcccattacgatctgttttacctgttcttttttctcccccagagacagtcagtgtatagggcatatccgaaataggattgttcaattcatctaccagtaagatttctatccaagcattatgtttagcacaatcggggcaataaggatcattatatttatcgtatctaaatgtcatttttcttccttgtcatccttgttatatagtcatatcaggtaatagattatttttatttagatagcgtaaaaataaatcatcatacagataggcggtatctaatctatttttctgacattcgtccatccaatcgcggataaaccctattaaacgaccgtcaacttcatctaactgataagctaattcactctgtttttcccaaaactgaatatagaagttattaattacattaacataagcctgttcagaatcacgccaagctgtaattagatgctctcttaattcataatctacggggctaataaagggatctgcatattgaggtcgcgtatagttttcattaacctcatcaccttcaatcaagcagtcatcaacaggcatcattaagacagcccaatcgccaagtgataattttggtaatagcgtacgcgctatacgcgcatcaaaaaaacgaaagataacttttttatcattcattatcactagttgatgcttttgccaatgagtgatttgggtacgccaatcgagttggctatgataagcccatccccagctattatcacctaatggcatagtatctaatacttggcccaaatgtgagtattgcgagggttttacttttaccaaccatggactgacactcgataagtgtgataatgccgttccacgatatatagggaatgcctcttcaatccaatcattaatataaaattgtttaatcggatttggttgcgataacgtgttaattaaaaaatacacatcactttgaatggtatttgttaaccatgaagtccatgtcagtgacattattcatcctcatttggttttataattattccccctgagtgctgtgctgctactgcacagtatttttttacaggatacggagataactctaaaggagggacgccttgcggtagctccaaatcgatagaagtcccacttcctgcactaccaccaccgacgaccaaattattcgaagtaaatatcatattgggagtgatccgtataaaactctctcccactttaagggtgatttctgtccccgcatcaagcacaattttaccgccactcacaaaataagtttgcagagtgctttcatgcaccgcatttccatttactttcgtcttttcatcaccttcaatatgtaatgatacatttccagtgatatgatttttttgtgagccttttaaaataaagtgatcattacctgcgatttcggtaaattgatcattattaatccgtttttttgcatcatgctgaatatggaaatgtgcgttatgttcaatatgagcattcatatcgtgttgtgcatgaagatagatttcttctcggcctgctttatcatcaaagcgtaactcgttaaacccttctcctttatgcgtttttgttttaaacgtagtacgcgtcatctcataaggtaggtttagtggcggagtattgcgtccattatatgtacagcctgaaattataggtctatctatatctccatttagataactgataagcacttcttgtccaatcctaggtattgccataaagccataaccgttaccattccatccctgcgctacccgaacccaacatgagcttcctaattctggttctcgcatgcgatcccaatgaaaataaacttgtacagccccttcttcattggtatagatttcttcaccttcagggccaactactgtggctaattcatcgccatcagctgttggtttatgaataaaaggcgggcgccaatttaaattatcaggaataaaggttaaattattcgataatgttgttccttgcccttccctattatcagctaagggttgagtgccgtgatgagtaatagcaatgacttgccaacggcgattcatatttgagcatgggtgagaagataacgaaaaaatttttcctggcatcaaagcaaaacaattagttaatgcattgccgacgcaacgttgttgttgtatctcttccattcgaattttggtataacgatctgcatcatcttgcgtctgaaaacgcccataactttcataaaatggatgctgattatgtatttccccttctattttactttcaaggggataagaaggacgtttagaattataatctttgtaaagaattttatctgaaagcagtgactctctataacgccaatgatatgcagtatgatctctagtatctgtttcatattgtgggttgtaaattaagtcaatatctgccgtcatacctaagtgagaatcgctgtaaaacatccgtggctcaattcctgcatcttcaaaccaaaagcttattccctcttctgcagctaaacggcaaaaaaactgataatctgattcacgcttttgtgttatataatcacgcttaggataagcatcctcagcatagagtttgcaatccgctttaatatgagactcaaataataattgctgaagtaagtcaggcaccgttatttgtcgaaaaattcgactgttttgccctaaagacataacccaaatttcaggtcgaataataaagtgataccacgtttgattaccatctgtattttgttgctccgcactagctaatagcccacgtacagtacgaataggtttaccattgcgcgtaaccgttaaggaacaagcaaaccccaacatatcatcaaaacagatagacggtaatgaacttaccgcagttaaagaaagtgtaaataactcagataaatgctcagtcagttgaaattctgtcacagtgaatgtttcttcaggaattcctttaaattgacaggtaaaaactaatccatccatgactatttctccttgcgaataataagaaaaaatttaacaagtaactctattctttccataagagcagccacattggacaatagagccttctacagcaattttttgtccatccagtatcattccttgctctccagtcactatcgtgccttcttcattgcatactggacaacgtgttgttttatctccaagcctcaatatgctaatcccttcattggtgaccgttaatatgctagcaagacaagtcgctccggtggtcgttttgtcattatgtaatccaatttttttcccaaggactgtggctctcatcattgtttccttacatatatgaagctataaagatcgctacgcagtatcaaaaataacaaattaaactaaacgattacactaaaaacacttcgtccgttatatccgctaccttagccaatgcgtacaataagacttgaataaaggataataaaagcttattaataaactgtaaacagctcccatatttagcatctctctagcataagtcactttgcgtaaaatgattaaaatatcactatatcatgctgtgaaaataatcataaaaagtatttgttagtataaaatatgaataataaataaacaaattactcataacccagtaaatactgggtacagtaaaatatattttgtttccaatatggaaagctcaaaaaatagttcataatgcattgatttttaacagttaaaaattaatcacattcaatttcattaccttgccactttaaatagctcaattttatcaatatatttagctaataagcttggtttaattaaaatataattctaaataagccgtttattttatttagcctatataatatgtctgttttttaatcttcttttgggctttttatattcattttatgaataatgataaaattcggattgcataaataaggagaaacgaaataaataaagattcatattatgttagatatattattttttataaataattaatcaaataagtaatagtagaaaatgacggggaaaatagaaaaagaaaaaatgatatggttaacacccaaaaaatacataagaaaaaccgcttaaagcagtcgttttttaatcaatattaaatgtgatttcatcacattgcgatgggataaaactatgcactattttagtgagtataaccattaacccaaaagccatcatcagatagcttttggattataaataaatgaattatttaatcacaccacatgccattctagcaccaccaccgccaagcgcttctgggttatctgagtagttatctcccccaacgtgaaccattaaggctttatctttaatttgatcaagcttagtcagtctaggagcaagaacggcataatcagcgtcacctttactattggcaaccaaaccaggtagatcacctaaatgcccttctttgttataaggccctaagtgaacacctttattttcaggatcaagatgaccacccgcttttaatgctggaacaggttttccatctttcatatctggctcacaagagccattagcatggatatgaaaaccatgaacacccggtgttaacccagtaagttttggcgtaaataacagcccataatcggtttcggtaatagtgacaacaccaatatcatcacccgcccctgtaggtaaggcttcttttaacgtaacatctaagctcgccgcactggcaaccgatgtaaagagtagtccagagagtaacaaaggtatcagtttcatagtatcttcctcttattatttatgctcagcataaagtcgtcgatatcaacaaatagagactcaccattaatactgtttcaatgtacgttaattagcatatcgtcttaatgcaaaaaaagcgacttatgtcagtaagtcgcttttttatcttaaaatatcaataactatcgatattatttacttttttcaacccatttgccatcaatataaaaggctgaccaacctgttgctttcccctctttttcagaagagacatattgctgtttagttttacgactaaaacgtactatggttggattcccttctggatcggttacaggtgcttgtgctaagtagcgcattttttccgataatctatctttaaaacgtactaactcagccactttcggtgcacgggtttcccttgatttagggaacgtattggccgcaaggaaaatacccgccgcgccatcacgtaacacaaagtaagcatccgatttttcacaaggcaattcaggtagtggaaccggatcttcttttggtggtgcaatttcaccactctttaagatcttacgtgtatttttacactcttcattggtgcaacccatgtacttgccaaaacgccccatttttagatgcatttcagcgccacatttatcacactcaatcactgggccttcataaccttttaagcggaattcaccttcttcaacttcataaccatcacatgcaggattattaccacaaacatgtaatttacgatgagtatcaataagataactgtccattgccgtaccgcatttcggacaacgacgacgggcacgtaatgcattagtttccgcatcatctccttccaagatattaagtaattcatcttcaggaataagatttatcgtttgtttacaacgctcttttggtggtaaagcatagcccgagcaccctaagaatacccctgtcgtcgctgttctaattcccatatgacgagaacaagtaggacattcaatagaagtaataaccatagggttaggtcgcattcctccttcttctggatctttttcagcgacttctagttgctgactaaaatctgtgaagaatgcatctaataccgctttccagttttcttggttgttggcaacatggtcgagatgatcttccatttgagccgtgaaatcgtagttcatcaaatcactaaagttttcttctaagcgatcggtaacaatctcacccattttttctgcatagaaacgacggttttcaactttgacataacctctatcttgaatggtagagataattgaagcataagttgaaggtcgaccaatacctcgtttttctagctctttaactaatgtcgcttcactaaaacgcgctggtggcttagtaaagtgttgcgttggcgataactcagctaacgctaattgcgcccctacatcaaccgctggtaatgttttatcttcatctttactgcgcattgctggcatgacttttgtccaacccgcaaaacgtaatgtgcgacctttagcgcgtagtttataatcccctgatacaaccgtaagtgtggttgagtcatattttgccggtgtcatttgacaggcgacaaattgatcccaaatcagttgatataaacgcttcgcgtcgctatccatatcttttaaagattcagccgtcacattgatatcagaaggacgaatagcttcgtgcgcttcttgtgagttctctttacttgaataaacattcggctctttaggcagatattttgcaccaaatttatcgtgaatataatcacgtgccatttggattgcatcctgactcaggttggtagagtcagtacgcatataggtgatataacctgcttcataaagacgttgagccaacatcatggtctttttcaccccaaagcttaagcgagtacttgccgcttgttgcaatgtagaggtgatcaaaggggcacttggtttactggatgttggtctatcttcacggtttttaacgatgaaagtggcattctgtaacgccttaaccgccacctgagtttcctcagaggagactggtttaaaggcgttatcttgatagtgcgtcacttccatacgcaagggttgttcatcgggtgtcagcagtgaagcgtgtaattgccaatactcttctggcacaaatgctttaatttcacgttcacgctcgacgagtaggcgtaccgcaactgactgtacacgccccgcagataaaccacgcgccacttttttccataacagcggagaaaccatatagccaactacacgatccataaaacgacgtgcttgttgcgcgttaacacggtcaatattcagctcacccggtgtttggaatgcttgtgtaatggcatttttcgtaatttcattaaacacgacacgactaaatctatcatcttcaccgccgatcacttcgcgtaaatgccacgcgatagcttctccttcgcggtcaaggtccgttgcgagatagatatgatctgctttttcagccaatgcttttagttcagcgactaccttctctttacccggcagaatttggtagtttgcatgccaaccattataaggatcgacacccatacggctgactaaggctgatttctcatcctttttaacctttttcacgcctttcgtggcggatgagttttcgctcttctggctgccagaaccactttttggcaaatcacgaatgtgacccacgctagattttactacgtagtcattgccaagatatttattgattgttttggctttagccggggactccacgataacaagagctttacccataattacctttacctaattaaactttgtcatgacggtattgtttaataccctcagctcagaaaacttttgaaatctctttttatattgcgttagttttgcaatatatcaacctgtttttattcaaagcttttgtttaaacgcaaaacacgctactttttttgaggtattttaatcacctcatcactgattcaggtctaaaacatagcgatgtctatgtatatagagtagctaagcttttaaaaatgccacactctacctgataaaaagcgaggcgcaacaaattatttttctaaggagcataaatgatgtcgacacaaactacacctatttccgcagagatgctacttgaaaaagcgaataaaatcatacgtgaacatgaagactatttacaaggtatgtacgcagattctgttgaacaaaaaggcaatgtactggtatttaaaggcgaattttttttagatgagcagggtttacccacggctaaaagtaccgctgcattcaatatgtttaaacatttagcacatgtgttatctgaaaaataccatctagcgtgatgatgtttgctgactattttggcacttattgccaagaaatcggttattaactatcaatataagatatagagaagattttcagagcctatcaattcaatatgtaatatcaattatatttattttctctttatcgctatattgagtcttcctagaaagaggaaatattgcccgattgttgttaaaaattatcaattatttttatgccagtgtgtacctcactggctttttttattcgaaaaacgctgaataaataataaaaaaatagcgatactcagcttacatctaactgctgaatatcgctagtttgatagcaactcgttatttgataatgcttataacagtgggtttttacccctttgtagccaacgcatcattaatttatccacgctttccattgcgccaccagtaactcgttctaccatttttttcttcaggatatattgaacggataatacttcaaaatcattaatacgactaatgagccaatcatcgctgacccccacttcatcaatcagccctttatctacagcatccgttccataccaatactcgccagttgcaacactatcgatatctaattcagggcgatatttatgtacgaaagacttaaatagcagatgagtttcattgagatcttgtttaaatttctcacgaccttcatccgtattttcccctaatagggttagcgtgcgtttatattcaccggcagtatgtaactcaacatcaatgtcatttttctttaataaacgatgaatattgggtatttgagcgaccacaccgatagagccgataatcgcaaaaggtgccgcaacaattttatcagcgacacaggccatcatataacccccactggcggcgactttatcgaccactgcagttaatttgatccctttatcttttaaacgagttaactgggctgctgctaggccataaccgtgaaccataccgccaggactttcaagacgaagcagtacttcatcacccgcttgtgccacagagaggatagcgcttatctcttcacgtaatgcaccaacttcatgggcatccatgctacctttaaaatcaataacatataaacaaggtttaacaacgcctttgcgcccttctttagcattgtttttactcagtttttgctctttcttttgttgttttttaaacgctttatgccacacttttaattcagcctcatccattttggcttgttgcataacacgttgtttatcgtggtaagactcagcaagatcagtcacctttaatgtgccttttcgatgttgctttttactaccgataaccacaaaaaacgaaacaatagcaataatagcgactacaacagtcgcaatctcagctaaaaacagtccatattgtaaaatatactccacaaaggcctcttttaaggttaataaaacacagtgaaatcatagcacctagtttaacgaaattttacgctgatgccagtaacaaaggcgccattctggcagttattatctgtatcactagccgttaatcactttaaaaatgagtcgctaaactggttcttaagcacataagacgttacactttatttatttttcaataaacaggatattaatatgttgcaatatcaacccgatcatactgtattaagagataaaataattctagtaacgggggctggtgatggcataggtaaagaagctgctctcacatatgctcgctatggtgcgacattaatcttgttaggacgtaccttatctaagcttgaagatgtacaaaatgagattatcacttcaggcgggcaacaaccgatgctttaccctttagatctactcaccgcgagcgagaacgattatcaggaatttgctgatactatcgtaaaacgttttcctcatttggacggtgtattacaaaatgccggcctactcggtgtcgttgagccgataattaaccaaccaagtacactttggcatgatgtgatgcaagtcaacgttaatgcaacctttatgttgactaaagccttaatccccctaatgcttaaggcacctcatgcaagccttattttgacaacctccagtgtaggtcgccaaggccgttatggttggggggcttattctgtctctaaatttgccacagaaggcttaatgcaagtgttacatgaagaatataaagacagtagcttgcgtattaactgcatcaatccgggtggaacacgcaccagtatgcgagcaagtgccttccccgatgaaaatgcacaaaaacttaaaacgccaaaagatctaatgccgttatatctctatctaatgagtgatgacagcattgaagtgagtggtcaatctttagatgcacaacccgatcgtaaagccggacctgctgaataacttgagaatataaggtttatcctatgagtgatgcacaacaccaacagcgccaacaacgtttgaaagaaaaagttgatgcccgaattgcgcaggcgcaacgcgaacaaggcattttgatgatttttactggtaatggtaaagggaaaaccaccgctgccatgggaaccgctacacgtgcggttggtcatcataaaaaagtcggtgttgtgcaatttattaaagggacatgggaaaatggagaacgtaatcttttagaacaagccggcgttcccttctatgttatggaaaccggttttacatgggaaactcaagataaagctgccgatacacaagcctgtttaaatacttggcaatatgcactgcaattactcaattcacctgactatgatttagttgtgttagatgaacttacttatatgatcagttttcattatctaccacttgaagatgtggttgcggctattacttctcgtcctgatcatcaaagtgttattattacaggacgaggctgtcatagacaattaatagaattagcagacaccgttacggaaatgcgtcctattaagcatgcgtttgacagtggtatcaaagcacaaaaaggaattgattggtaaaataaacgcgtataataaactcgtattatgtgttcagattgccgtaatatatttatatcaatacaggttcacctaatatacctgcaccaaatattcttccggtctcttttattaattgaaagtaggcttctttatcatccagtatatcattttgtatttgttggctataaatccatgccatagacatgatatgcagatgataaatattataaagctcttgtttcttatcaggatcacgagacgctaaatacgagtaaactatttcataaatagtattggcttcttgtactaattctttattattaaaatttatttcactcagtgtaggattaaaatcctcagtacgtgtatctttttcatttatccaactaaactgttctttcttagcttgtttggttaataaatcgtgattgttatcgaaatgaataccataaggatatttggctaaaaatgtttgaaactcctcttgagagaagcatttagtcaatacattgcctaccccagaattcttccaatctggtaaataaggaggaataggctcatttaatggaatgtcacaacgaaagatattgttgtcgataaacacagcatctgtgctattaatagcaccatgtattaattgtccattgatccaaacagagcgcgtatctaaataaaagtgttctttattttcttctgaagtaaacacggaagtaaagctatagtatatttcctgagagggattaataatccccccattatttccagggtaaaccataaatactttcttttcacctgagtttgattctaatatatgctctccattggttaatgttattttttttacctcacctttattaatcgaaaaatgattagtatcaattttaaattgtaacggcacattgttattgttactgatataaaaaatgcctgtttgtgttgtcgatgttgttgcctcatcacagcctaaactaagaaagttcatacacaacactgttgttaaataaatataacgatgcatattatcgcgtataccttatcgtaataaatacaaataaaatattaatatgatagaaacagcttatcatcgtattaatataagcatcatagttttatttattataaaaataaagctatcaaaaaaagaagtctgctaaaaattagcagacttctgtatctaactgaaaatttaatttgaatttatcaataattattcgtttatttgcttttacttcccgctgattggcggcggcttgaggcacgcttagccggtgaagttgaagtacgcgcagaaattttggtatgacgtttcaccgcccgacgaatttgatttgctttaattcgacgctgatctttttcgacagccactttggttactgtctcatcgtttagttccaccagctggcgtaaatagttaatttgatttaagcctagctcaacccatccgccacgtggaagtcctttaggcaaatcaatatcaccataacgaacacgaataaggcgactaacctgcacacctaccgcttcccacatacgacggacttctcgattgcgtccttccgttagcgatacattgtaccattggttaatgccttcaccaccgcgataagaaaccgaacggaatgatgccggcccatcttctaattgtaccccacgagtcaattgacgaatttttgcatcatcaatttcaccaaaaacacgtaccgcatattcacgctcaacttcacgacttgggtgcattaagcgattggctaactcaccatcagtggtaaagagtaataaaccactggtgttaacatcaagacgaccaacggctatccaacgcgcactatttaaacgcggaagacgttggaatacggtcggtctgccctgtggatcactacgtgtacatagctcaccttctggcttgtaataagctaacactcgacaaacatctttttgtgcttcgcgaatacttaatatacgaccatctaaacggattttggctgtagaattggcatcaatacgatcgcctaattttgccttcacgccatcaatactgatacggccttcttgaagatagccttcaatctcacgtcgagaaccatgaccagaacgagcaagaattttttgtaatttttcagtacgttgcgatttatcgctcatgaaacaacctcatgtgtcgccttcacaggcgtcataaaataaattagtttttaaatcaatcaggtaaaaaataacccatgtttattaaactgtttaacaaacacaggtctattgattcagggataagccatgccaaagtgacaataaaatgagcatgacaaataaaatcgtgtcgataaaatagcacctaaggcttccatcgttactatgccgtttacttcaaaaacagctttcttgatgtcactaaccacaagatgcgcccaatggctttatcgcagtgcgtaaatttaacacaagcaataaatctcttcaccttttatctcactataataagtcccctatgatgcatttaccaaatttaaaaggttattgaaaaggcgtaatatcgcccattccttcacggacaataacggggctatcttctgttaaatcaatcaccgtggttggcttttgccccaagtaaccgccgtggatcactaaatcaacctgtttacccaataagtcattaatctcttccggatctgactctgcaaaatcattacccggtaatattaagctggtagacattaatggctcaccgatattttctaataatgccagcgcaataggattagaaggtacacgtaaaccaattgttttacgtttatcattcattaaacgcttaggtacatctttggtggcttttaaaataaaggtgtagttaccaggcgtattatttttaattaaacggaaaacaacattatcaacataggcataagtggcaatttctgataaatctcgacacattagagtgaaattatgatgtttatcgagttggcgaattcgacaaatacgcgtcatcgcatctttattatccaaacaacaacctatcgcatagcctgaatctgttggataaattaccactccgcctttgcgtaaaacatccgcactttgttcaattaaacgagcctgcggattatcagggtgaatgtaaaaaagttggctcatatatccctcaacgactttttgatgttatccctgccataatgtccatacaggttcaacattagcgggtaaccataaattacgtcctagctctatccacgagcaagggcgatgaaaatcagaacctaacgaagctttaagatcataagcttgtgctaaagctgcgtgttgttctcgctcttgtggtggttgttggcattgtgccacttctatagcatcaccaccttgttgtttaaaataaagcactaatcgctttaaccatttagaggatagaccatagcgaccaggatgtgccaataccgcaactccacccgcttgatgaatagccgtgacagcgtcaccaattgagcaccattgtggcggtacataacctgtttttccttttgctaaatagcgtttaaatactttattgaccgatgccacatgcccttcattaaccaaaaaacgcgcaaagtgtcctcgtgtcacttgcccgcctttcgctagggcacttgccccttcccatgctccagcaatacccgctttagctaaacgttcgccgatcattttagcgcgagtttcacggcattgactctgttttgctaggcatgtcgtcatggcttgatgttcgatatcaatctgtaatccaacaatatggatttctatattctcccacaaagtcgatatctcgacacctgatatcaaagttaaaggtaaacttttttctgcaatataatttttggcaggttggatagcagcagtagtatcgtgatcggttatcgctaataccgtaatttgtttttcaatggctctatcgattaattcatcaggtgagagctcgccatctgatgcagtagtatggctatgcagatcataaatcacgcgtaaatcagatagcaattcagtcattccttctccctgtttatcctcagtgatacaacgaatttttaagagtatgccataaagtacttgacgaacctaatataatccagtttactagtacacaacatgagctagtctattaaatataaacttatcatccgctgtaaggagatcttatgaatatcaatcaacgtcttattgctctgtggtggcgcaaaactcttttatgggcggtttgatctcctgcttagcatcagtgatatctaaaacccgcctaccgcgggtttttttatatgccaattttgtgcttatcagcaccagaaaaaagaaaatagagcgataataatgaacacttcacttgcattcccattaacaactaaggtaacggcattgccttatcacagcgagccggcgttacttttcaatacgttgtgtgaacatcgtcatcacaccttattgttagaatccgcacaaattgataccaaagccaatttaaaaagtttgttaatcgttgatagtgcattacgtattagtgcaaacaaaaatcaagtgactgtcgatgcgttaagtctcaacggccaacatatcttagcgttattaaaaaacgcactaaaagaaaaaagcacactctccgtagagcgagcggaacaatgtgtatttacttttgcatcatcatctttccctcaagatgaagagagcaagttaaaagcggctagcgtatttgatgttttacgttttttcctagcaaatagcgctgcaaaagaagccaatgctatttttgtgggagggttatttgcctatgatttagtgaacggatttgaatccttacctgatttagaagcggttttttcttgccctgactactgtttttatttagctgaacagttaattgtgatcgaccatcaacatcatcatagccaattaatttccgttgcctttacggataatccacaagagtgtcagcgtcttgatacccgtcaggcacaattagttgcactcgcacagcaacctttaaaacaaccacaacgtcaaccattaacacctcagcaagcggttgtaagtagcaatatgaatgacgaagagtatggtgctattgttgaagcgatgaaaacctatattcgtcgtggcgatattttccaagttgttccatcacgtcgttttcaaattaactgcccttcaccactggctgcctatcaagttttgaaacaaaaaaaccccagtccctatttgttttatatgcaagatgcgttatttaccgtttttggtgcgtcacctgaaagtgcgttgaaatatcaagcaagtgatcgccaaattgaaatttatcctatcgcaggtacacgcccaagaggtcgcaatgccgacggctcaatcaatgctgatttagatagccgcattgagcttgaaatgcgcacagataccaaagagttatcagaacaccttatgttggttgatttagcacgcaacgatttagcgcgtatctgccaagctggaagccgttatgtcgccgaattaaccaaagtagatcgctacgcttttgttatgcacttagtatcaagagtggtaggaacattacgtcatgacttagatatttttcatgcctatcaagcctgtatgaatatggggacactctcaggagcaccgaaggtcagtgctatgcaactgattgcacaatatgaaaaaaccaaacgaggcagttatggcggtgcaattggctactttactggtaacggtgattttgatacttgcatagttattcgttctgcttatgtagaaaaagatattgcaactattcaagtgggcgctggtattgtgctcgattctgatcccaaaatggaggcagaagaaactcgcaataaatcacaagcggttatcaatgccattttacaggcgcatgctgaaacgcatatgcaggaggcttgctaatggcgacgctcttactactcgataatatcgactcttttacttataacttagtcgaccttttacgcagtcaacatcatcaagtgatcatctatcgcaatgatgtcagtgcttcttttatcgaaaaacaattaaacctgttagataaccctattcttatgttgtctcccggccctggtacaccatcacaagcgggttgtatgcctgagctacttaatcgcatgttaggtaaattgcctattattggtatctgtttagggcatcaagccattattgaagcttatggcggtaaagtctcttcttgtggggaaattttacacggtaaagctacgctcgccacccatgatgggcaggcgatgtttgaacatctgccaaatcctctgcccgtcgctcgttatcattcactctctggcgaaattgtacctgagcaacttatcgtcaatgcgtggtgtgataacaccgtgatggccgtgcgccatcgccaacatcgaacttgtggttttcagtttcatccagaatcaattttaaccactaaaggcgcacaacttttacaacaaaccattgcatgggcacaagcaccaagaggagacgcataatatggatactatcttcaataaattatttgcaggacaacaattaagcttagaagagagccaaacactgtttagtgcgattattcgtggtgaattaacagaatcacagttagcagcggtattgattagtatgaaaatgcgtggtgagcaccctcaagagattgccggagcggctcgtgccctattggataatgcatctccttttccacgcccagattatctgttttgcgatattgtgggtactggcggcgatggagccaatagcatcaatatttcaacagccagtgcgtttgtcgcggcagaaattggtctaaaagtggctaaacatggtaatcgtagcgtgtctagtcgctcaggatcatcagatttattagcggcatttggtattccgctagataaaagtgccaacgatgcccgccaattgttagatgaaattggactatgctttttatttgcgccgctttatcacagtggttttcgctttgccgcccctgtgcgccaacagctaagaacacgcacgctctttaatgtgttaggcccattaattaatccagcgcgtccgcctttagcattaattggtgtttatagtcctgaattattaatgcctattgcagataccttaaatgtcttgggctacaaacgtgcggcagtggtccatagtggtggaatggatgaagtgtcattacatgctcccacacaagtggctgaattacacaatggggaaatcactcgttatcaattaaccccaagtgattttggtctgcgtccttgtgcgataagtgatcttgaaggcggtacacctgaggttaatcgccaattattggctaatttactgcaaggacaaggtaaacgcgcacacactgaatccgtcgctgccaatgtcgccttattaatgcgtttacacggacaagaagatttgaaagctaataccgaagttgctatgcacgcaatctatagcggtaaaaccattaatcgagttaatgcgctagccgcaagaggataaaaataatgactgtattaaatgccattgttaaagataaagccgaatatttagttgcacgtaaagcacagcaacctttatcaacctttatagataagattgcgccatcgacacgctcattttatcaagcattaacgcaatcacacccagtgtttattttagagtgtaaaaaagcatcgccctcaaaagggattattcgctctgattttgatcccgttgccattgcgaaaatttatcaaccctatgcagccgctatttcggtactgactgatgaaaaatattttcaaggcagttttgattatttacgtcaagtgagtgatgccgttcatcaacctgttttatgtaaagattttattatcgatgaataccaaatttatttagctcgtttttaccaagctgatgccattttattaatgctttctgttcttaatgatgaacagtaccgtgcgcttagtgccgttgctcaccaattaaacatgggagtattaacagaagtgagcaccgaagaagagcgtcagcgagccattgagcttaaagcaaaagtgatcgggattaataatcgtaatttacgtgatctctctattgatttatcccgtaccgaacaacttagccaaggtttaccgcaagaggctattgttatcagcgaatctggaattcatacccatcaacaagttaaaacactaagtcaatatgctaatggctttttagtgggtagtgccttgatgtcacaagagaatattgcccaagcggtaagagcacttattttgggaaagcataaagtgtgcggcttaacccgtacacaagatgttaaagcggcctatcaagcgggtgcctattatggaggattaatttttgctgagaaatcaccacgaagagtgacactgtcacaagcacaattattggtaacacaagcgccattagcttttgtgggcgtttttcaaaaccaatctattgagcttatttgtgactatgctaaacaacttaatttatctgcggttcagttacatggcgctgaagatgcacaatttatagcccaactaagggaaaaaatcgccccacaatgtgaaatttggcaagcgcttaatatggcttatcaccatgatattcagcacattgcgcaagttaacaaatatgtattagataatggtacaggtggcacaggcaacacctttgattggcaaactattccgcctactttacgccataaagcattacttgcaggtggcctaaacagtgataactgtttagatgctctaaacaccggttgcttaggacttgattttaattcaggggtggaatcttcagcaggtatcaaagatccacaacgtctatcgcaagtctttacacaattacaacaaagcaaattttcacaaaatttctgacaaggacaacatcacaatgagaaaacttaatccctactttggtgagtttggtggtcaatatgtaccagaaatattgatccctgcattagatcaacttgaacaagcctttattgacgcacaaaacgatccgtcatttcagcaagagtttcaagatctactcaaaaattatgcaggtagaccaacggcactgacactctgtcgcaatttgacccaaggtactcgtacccgtttatatctaaaacgtgaagatttattgcatggcggtgctcataaaacaaaccaagtattaggccaagcactgctagcaaaacggatgggaaaaacagaaattattgcagaaacgggcgctgggcaacatggtgttgccactgcgttagcttgtgccctgttaaatatgaagtgccgtatttatatgggggcaaaagatgttgaacgtcaatcacccaatgtatttcgtatgcgtttaatgggtgccgaagttattccggtgcatagtggttcatcaacattaaaagatgcgtgtaatgaagcgttacgtgactggtctggttgctacgagcgtgctcactacttattaggcactgcggcaggcccgcatccttatcccactattgttcgcgaattccagcgcatgattggggatgaagctaaagcgcaaattttagcccgtgaaggtcgtctccctgatgccgttatcgcctgtattggcggtggctctaacgccattggcttattcgcctcatttataccagaaacctcagtacaattaattggtgttgagccggcaggaaaagggatcgaaacaggagagcacggagcaccattaaaacatggcaagttaggcatttatttcggtatgaaatcaccgattatgcaaaccgaagaaggccaaattgaagagtcctattctatttctgcaggattagatttcccatccgtaggcccgcaacatgcgcatttaaacagcattggccgtgcagattatgtttctgtaacagatgatgaagccattgaggcttttaaaacgctatcacgccgtgaagggatcatccccgcattagaatcgtcacatgctctggcctatgcgttgaaactgattgcccaaaatccagataaagaacaactcttaattgtcaatttatccggacgaggtgacaaagatatttttactgttaacgatattttagctgcacgaggagaaatttaatgagccgttatcaattatgctttgaagcattagcacaaaaacaacaaggcgcgtttgttccctttgtcactttaggtgatcccgatgctgaactgtcgttaaaaattattgacgcattaattgaagggggtgcagatgcgttagagataggcattccattttctgatccactggctgatggccctactattcaaggggcaaacttacgggcattaaatgctaatgtcaccccaaccctctgttttgagttattaagccagatccgccaaaaacaccccactattccgattggactattggtgtatgcaaatcttgtttttagcaatggcgttgataatttttaccataaatgccaacaagcgggtgttgattcagtactgattggtgatgttcccttgcgtgaagcaaaacaatttcgagaagcggcattaagcgcgaatattgccccgatttttatttgcccgcccaatgcagatgatgagttattacaagagttagccaccagcgcagagggatatacttatctattatcaagagccggtgttacggggacagataaacgagcagaacagtcactcactcatttaaccagtaaacttaaagcttataatgcaccacctgcattacaaggttttggtatttctgagccacaacaagtttcacaggccattagtaatggtgcatttggcgctatctcaggatcagccgttgtacaaattattgaaaataacctacatcaacctgatgtgatgttaaaaatgttgacgcagtttgtgcaacaaatgaaagccgcaacaataagcgtttaagtctaaaattattatcgccgtctgcttagagaaaactttttcctaagcagatttttcctaatttaatcattaacaatcgaccatcacttccccatcagcctctattcatagcgcgagtaatgcttgattcgcctaaacaagcataaaactatttttgctcagtcagttggcaatctgtcatttcttgcacatactttatatagggtatacagctttaggttttctattcagtagtactcaatcaataatgtcattataaggagtttgataatgaaactatgggcaaaaatttctaccgtattagcggcattacttatggccatgactttatctgcatgctctccaacggcaacatcagaaggcactgggggatattttgatgactcggtgatcaccactaaagtaaaaacagctttaattggtgagaaaaacctaaactcaacacaaattagcgttgagacatttaaaggtaaagttcagttaagtggttttgtctcttcacaggctgatgcaaatcgcgccatagaaaccgcacgtaaagtcactggcgttaaaggtgtcattaactcaatggttatccgttaagctattttttataagtcagtaagaaaaaagccacttcggtggtttttttcttgtctcatctaaagcattccacactctttggtatgaagatcaatttttgacaaattctctgttttactaaaattagccgtttcttttttacgggtaaaataccccaaaaaaaaccgttaaaactaaagttatacttatcttttttcgatgttattttcaccacactggtgactttcacttaaatttgatgcgaccatcattttcttaatagtactattcaatatcagtaataatattttggccgatttaggcgctattttttaattattattaggcaatatcatgggcatataaaacatgcaaataaaatacatctataaattcccatttatgcaagacaattaaatgctcatcgagaatagtgattatttttttaactaataaaaaatataaagatgtatttttaatgcactattaaaatatacctctattattttagttataatcagctaagccttaatacacataatagaggtaataaaattttttagtctaaacacgatcactgtagataagcaattatgattaacacagataaaaaaaaagcggagccactgccccgctgatacttaatagcatattctgttattgcaagaataattagaaacgataaccaacaccgaacataaacacaaatgggtctaagcgagtatccactttatagtggtttccatcgccatctttaaatttgacatcggtttcgatattcatccaccaaacagaagcgttcagcatccagtttttatctaggttatagtctaaacctgcttgtgctgcgaagccccaagagtttttaagatcaagatcatttaatccaagtttgcctaccgctggattattattgaatttttcatcaaagaaggtcgtaaagtttagaccagcacctaaataagggcgtaatttatcttcagcaccaccaaagtaatactgtgccattaatgttggtggtaaatgtttaactttagcaatttcgcccacaccagttaaagaaactttatgctcaaaaggtgttgctgctaataactcaaccccaatattatcagttaccatataaccaaaggttaaacctaattgagtgttgttattagcatcaaaatgcccacctaatatagtatctgaacctgtattaggacgaactgttgcagtacccgcacggaataaaaaatcacccgcttgatgagcaaaagaaatagacggtgcaagtgttgcagccgctagaataagcgcagaaagttttttcattatttaacccattcctgtaataagtaaaatctccgctaaaatatacccattaataagtaattatgatctaatgccgatcacaactttggaattatttttgcagaaagtgttattcctctctttattatttatgatgctgattatttataattgatccacatcaaatttagcattaatacaatattttcttataattaaatttattgtttttaagaatcattaaataaaagaacctcattaaaagatgatatttgacaacatcgttatttaattgttaatttaatgtttcatctgatttgattatttaattttcattcaccaaacgaatgaaaaaaacctttcaataacaatagctatagaaataacagaaatgatccctttttgttgtcttaaaaggtacaatatgtcccattgacttagtctatttgtataggagcagtttcatgcctaccccggcacgcacaatctaccgtgatagtcttaacttttataaaaatgaacaacgtagcattatcacgctatctgcagttttggccctcattttagctgtcatatatctattggttggccctaatgcacaagaatcacaaataattaatgactttattattaattttcaaaaaaccagattcgctgatgtctcacccgctgaattagaagcgatgaataacagtgttattggggtatttcaaaaggtcttactggtctatgtttttgagctttttcagcaaagtattctggttttagtgattttaatgttggcaatggcactttctgccggtcataacgtgacattgaaccaaacgtttaatgccagcttaccccgtttaccgaagatgtttctgctaattttgctctgctctattttaattagtgcaggctttatgttgattatccctggtatcattttattagtgggatttgcactagcgccagtcgtactggtacgccaacaatctattggtagcgcaatacgtctaggctggaaaatgggctttggtgaatcaggggcgctgatccctgccttaggaatttggattttattacaatttgggattggcttcttaagcaatattacgggtgaattgcctaacatgatccacaaatttttatattattttttaaagaatattacgtctgcatggatgattatttatctattccgtctgtttatgctgactgaaaataaatatatcaccaagtaaccccctcgcagcaaacaatgccgcgctaatgtgattaatagattagcacggcattgttattaacataatcatttaaaaataatcaattaaccttacacacctatccagccactaaaccccatgttattcattctatcccctcgtttccgtatccctgatgaaagtggcttggttatcttcagcaaacggcacttgttgttgctgtttgtgtttttcttttatttgttgtcgactttgatataaacgaataacaaaatagagatcgggggcaataattaaatcatcatcattgatagtgatcttgttacgtgcaatccaacgatttaattctgttctgcgcccagccaataccaatttaacgcctttgatcctaagctctctaattagctcatcaataacagcaaaaacactcacatcgtcataagtaaaacttacggtagcatcaaccgctaaccatgcaggacgttgtggcgcgctgtccactagctgtagtacccgctttttaaaatagccaacattgaaataggttaagggggaattaaaacgatacatcatcaatcctgatatcgattcaatgccgttaccttggttgattgagtggatcattccttgttcatcaacacctaataactgatcacttgggcggaatacaatacgtaaaaattgcaataacccaagtaacacagcaaaaccaatgccgttaatcaatcccgctaacaacaccgctaataaagtaaacgttgctaaggtaaaagcttgtcgatttcgtttacgataagaccaaatatgacgaatacttagcaatgaccaagaggaaacaatcagcacaacgcctaaagaagataacggaatgtaggcaataaagtcggtcataaaaagcaacacaactaaaatgactaacgcagccacaatagagaccaattgtgttttaccgccaacagaatcattcaccgcagtacggctactggcggcacttactgcaaatccttgcgaaagtgccgatgcgatattagcaatgcctaatgcctttaattcttggtcggcatcaacatcataaccatttttgctagcaaaacttcttgccgtcatcataaagctaacaaaactaatcaccgcaaggttaatggaaggaacaattaattcacgaagtgatccaagatgaaagccactcattgaaacgatgggtaaaaagagatcaccgttgtctgcttctttatcaacaatagcaatcccataattgactaaatcaaattgccaacttaaataggtcatcaccaccatagcaattaacggagcgggccaacgttgtctaaaatgacgaatacataatagtaatgctaaggttagcgccgacatcaacagtgttggccaatgtgcttcttttaatcgaaaaggtacttcaagtaatttttcaattaaatattctggggaggtggtaaaaccaaatactttactcaattgccccaccatgatagtgatggcaacgccatttaatagaccttgtaatataggtctagagagaaagtccgtaaatgcgccaaagcgaaaatgactcgcaagaatgcaccaaaaaccggtcattgcagtcattataatggccagttgccaacgggtattttcatcccccgcagaaagagggatgacaactgcggctatcacggcacaagttgcagcatcagggccagtaattaattggcgtgaagtgccaaataaagcatacatgatcatgggtaagatacaggcgtataatcccacaatggcattgataccgagtaattcggtataagcgatagcaacaggcaatgcaaccgcagcaacagaaagccctgctttaatatcatatccaagatattcacgctgataattaaacaataagcctaatccaggcatccattttattattctttttccgttcattgatttcctcttatctgaattactttttcgcgcattcatcaaaaagtcgcgtgaagagataatggctcaatgaatcatatactagagtgatgttttaatctcctaccataatcaatactttatctttaaatgacgcaagattaaattaaaccttatattcaatgagttaatctaatataaaaccgccatattgtgataaataagcctgatcttattaaagatatgcaattgtttacccttttcatgtcgctttgcattagaataacctagtttataaatttaacgacaataggtttctatcggttatgaaaaacggctggcttaagcaattacttgatttcgctccactattagtgttttttatcttttataaatggcaagatattttctatgcttctggcgcattaattgtagcaacatggatctcagtcggtttaacatggcttattttccataaagtcgaaaaagcaccactgatcaccgcaatcgttgtaacgatatttggtacattgactatcgctttccattcagatgtctttattaaatggaaagtcaccgcaatctacgccatttttgcgctagtgcttattgcgatgcaactctttacgccgaaaacattaatggaaagaatgctaggtaaagaattagcgatgccagcgactaattggaaaaaactcaatatcgcttgggtactgttctttttagcttgtgcgctgggtaatctttatgtcgcattttctttatctcaagaaacttgggtaaactttaaagtctttgggttaacaatattaaccttaatctttactgtgattagtgttgtgtatatctggaacaaccggttacccgaagaagagacgaaagaggaatcaacagaaagtcatacatctgaaacatcagataacggaacaacatcaacatctaaagtattacataaagatgtgacatctaaatctgaataatgacctctattttatcgggagactgcctcaagggagtctccttagttttaacattgatagatagtatttccccatgactgaacaacaatctttgcctaatggtgagctagtattacgtacgcttgccatgccagctgatactaacgccaatggtgatattttcggtggctggataatgtctcaaatggacattggtggtgccattttagcgaaagaaattgccttaggtcgcgttgttactgtaagtgtaacaggcattacctttctaaaacctgttgccgttggcgacgtcgtttgctgttatgctcgttgtttaaaaaccggtaactcttcaattactgttaatattgaagtgtgggttaaaaaagtagcaaccgagccggtaggtcaacggtatcgtgccactgaagccgtgtttacttatgtggcagtcgatgagaataatagtgctcgtcgcctacctgaaggtaaaacaaattttaccttagcaagtaccatggaataacctttttaagctcaataaaaccaacaaaaaaggcacttatcaaaagtgccttttttatcattgagtgatgtgaagctttatcaatcaatggcttcttattaacttgcagaaacaccatctatattaaaatcaatgataaccactttacctttataagggattttctcataacgccattgacgcattgcttttctcacttcgcgttcaaagacatttttggggttagcagagagaatttctacattatctacccgtccatcggcatcgatatcaaagcgtacttttattgacccctcaatacccacagccttggcacgaggaggatagataggtaacccttggcgaagcacattaggtacttttccttccccttggctagttgtcgcaacaggcttttcctcacctttattactcggtgtagcgttgggattaagatttttcatctcatttcccttgttcagcgccaatggctgttgctgtggccgttcgacaggtggctttggtttttccaccggttttggcttaggttttggtttcggttcgggcttcttctctatcggtttttcaatcaccggttttacatctgggatcggttctggttctggctcaggttctggctcgacaacaggctcaggctccggaggcgtcacctcttcaactacaggctcaggctctcctactggctcatctgcagcaaaggctagcatctgtatagagataggttctggtgcaattggcttatcttctacaacatacagtatggcagccgcaacaagcgaggcatgcaaacacagtgatataaatacccaaagcttaaagcgcataactgatcttatttcacctaaacaaaaaataatgcctctagtttaaatgcaaatagcaatcatattcaataacgtttatcaaaatgattgctataacaactaaaaaagctaaagatcaatttagttcggtgtattgcacgaacaacagcgctctatgttttctagaagtatcaagcttacgcatttggtaaatacgtaagttacggcgtgattgaccctctaaccaacggcgacggcgacgtaacgcttgtctcatcattcgccaacgtgccacttcattcctgctatgtctcattgcaatcaatacctattttttcaaataagtggtgtattataggacgttcattttatgatccaaggggggattgataatttgccttattttttatttatgctttatacctttctctcaaaaataaaatgtatcaaaataagtatatagcgacttatttgatgtttatctcttaccagagagatttgacagagaaaataatcctgatttaataacaacatttggcaaataatagaaataatgaactattgttagtaaattgcctccgacctattcatgcgattctttttcaacggaaaatagctttactatgacaacattttatactgtattaagttggctaacttttttcttctattggctattgatcgcaggggtcacatttcgtgtcctaatgcatcgacgacctgtcacctcaacgatgacatggctactgattatttatatccttcctttagtcggtgttatcgcctattttgcctttggtgaacttcatcttggtaaacgccgtgtcgaacatgctaggcagatgtggccttccgtagttgcatggcttgaagaattaaaaaaatgtaaacatattttcgctaaacactatagtgatgttgcggagcccatttttcagttaaccgctaaacgccaaggtattaatggtgtaaaaggtaataagatccagctactaacaacttgcgaagactcattaaatgccatcacgcgtgatattaataatgcgcgcgataatattgaaatggtgttttatatctggcaatccggaggattggtagaggaagtcactgaagcccttattcaagcggctaaacgtggtgtaaaatgtcgcattatggtggattctgcaggaagccgtagtttctttcgcaccaatggccctgcaagaatgcgagccgccggcattgaatttgtcgagtcattacaagtcaatctgttccgtttcttcttgcgtcgtatggacttacgtcagcatcgtaaaatagtattaattgataactacatttcctataccggcagtatgaatatggtcgacccacgctattttaaacaagatgcgggtgtcggtcagtggattgatattatggtcagaatggaaggccctgtttctacgacactgggtattatttatgccttcgactgggaaatggaaaccggtgaacgccacttaccaccgccaccagataacaatattatgccatttgaacaagcaaatgggcatactacacaggtgattgcctcaggtcccggctttcctgaagaactcattcaacaatcattaattacggccatctattcagccagaaaagaattagtcatgacaaccccctacttcgtgccaagtgacgatctggctcatgccatttcaactgccgctatgcgtggtgttgatgtcagtattattgtgccacgaagtaatgactctttcctggtacgttgggcaagccgagccttttttactgaaatacttgaggcgggtgtaaaagtttttcaatttgaagatggcctattacatacaaaaagtgtaatggttgatggtcaactgagtatggttggctcggttaaccttgatatgcgtagtttatggcttaattttgaaataactgttgtgattgatgatgaatgttttgctagtgatcttagcatcgtacaatatgattatattgcacgttcaacacaacttactcttgatgaatgggaaaaacgtccatttatgaatcgggtgttagaacgcctttgttatttctttagcccacttctctagaaagagtgatacaatcagctcagtaattatatcaacaataaaatagttagcgaaaacagctaactatcgatataaatagcgcgacaatattgacataatttataggcatgaccatgaaccaaccaaccttaatcagtgaagaagaagctttagaacaagcctatgatctctttttagcgcaagccgctgataatcttgatgtagccgatcagctgctttttaatttacaatttgaagaacgaggtgcggctgaagttgttacattagggaatgattggcaatttattgtcggtttacctgtttcatcagcccggtttagtgaagtgattatcggtcttgcaccggatgaaaacgccgatattgatgatatttttggtcgtgtattaattagtcgtgatcccctgcaacccatgtaccatattatttggaaatcttaacttcttaataaccacacaatttgtctgtttaactacactggcgaacttatcaattttaatttgtttaaaagtagcttatataaagactaaaaaggtcgcaaaagcgaccttaaaaaatatattgactatcgtgtgtgacacctttgattaaaaacgataaccgatacccactacccaagtagtaaaatcaatatcatatagtttggagtattcataagaaacatcaatagctaagttagtgattgggtttacttgtacacctaatccataagccattgatatcttattttctttttctctttcatcatagtagtgaaagtcttcatgaaaatagccaaaacctattaatccatatgcactgacataattgttaaggcggtaacttggacctgccgttaacgaatagtagctaatctttgaagtacctgcatatccccaatgatcataaccatcatttttattttttgcatatgaaaacgaactgataacgccccaatcattagctacttcatgattatattttaagttaatacctttaaggttatcatttattaaatcttcatcgactttcaatttagatttagcataccctatcgacactgtattttctaatgttgcataagcattaaaagaaagagtagaaacaacgagtattgaagttgaaagcaaaaaattaaatttcatttttattctctatataaaataacaaaaaaactaaaaaaattatattttttatgaagttaagcatctttaaacaataaaaacgatacaataaaaaacatttattataaagaaattcttattaataaaatgaaaataaaatctctctatttaattagagtaaacttatattatttttatccaccattaagtaaatattaagaattgttattgtttttgattattctaaattaaccaaaatataaaaataaaaaatcatacgcttatataaaatatatattattaaatctattattttatgctatctttatagcataatttatcttatgttatttttttattagttgagttatcaatgttaaaattaaataaaattcatcatgtggcgattatttgttctgattataagatcagcaaacatttttattgtcaaatactggggcttagcctattaaatgaaaaataccgtgaagaaatacaatcttggaaagcagagcttgcgttaggtacagtctaccaaattgaattatttagcttcccagatgcgccagcacgcttaagttacccagaagctcgtggtctacgccatgtggcatttgcagtggacgatcttgatgcttcagttgcttatttacaacaaaacaatattcaatgcgagccaatacgtctagatcctagtagccaaaaacgttttaccttttttcaagatcccgatggcttacctttagagctttattcaatatagttcacaacatataacaaggccgcaataaataatgcggcccaaattaatatattatttattaatacgttaaaatatagacataaaatgattaatctatatttttatcaaatacactattgactaaagtgatttttgactctgcttttgtatattgtttaatcatcggaatgatgcgacgaaaatgttcactattacaatgaatatctagtgcttctttatttggccatgattcaataaaaataaagtgaccgggatctttctcatcaacaaataaatcatagctaatacaaagtgcttcttgttggctagctttcaccaattcttggtaaagtggtaagaccgtttctattgatcctgatttaataaaatcttctgcaataacctttatcataaatatcccttactattaatatagaatggtgatgagctactatttactattatagaggttatattatgattaaaaataatagaaaaattcaaacataataccgcccaaaccaatagggtttaatggcccaaaaagaccaataggtagaaaagtggttgccatgatctatttccttagttttatatgcaagtgtatacgttgctattatttttgataaaaatagataaatcaataagataaactctactttttaagataatatttaccctattcacttttgttctgtatcacgatgctcttcccccctattttctactaaaaaacaacttactttctgtataaaaatcattatttacgaataattatgctaaaagtgtataaaaataggcgtttaaatttttctgtttctctttatataataacaggtcaaagtttatatcatgtacagtaaaagtatgggggttactgtgtggcttgaacaatttggagtgctcaatatttggacatatcttgcgggtatgttctttattattatcgtccccggccctaattccctttatgtgcttaaaaccagtgcatcaagaggagttggtgcaggttatcgagccgcattaggggtttttattggcgatgctatcttaattttcttagcatttatcggtgtggcatcagttattaaagcctctcctgtgctttttactattgtccgtttcttaggtgctttttatctactctatctcggtatcaaaattattcatgctaacttctttgccaaaaagcaaagccatactgagacaaactgtattcaagaacatgtatttcgtaaggcattaacattaagcttaaccaaccccaaagcgattttgttttatatctccttttttgtgcaatttatcgactttaactatgcacatactggtttatcctacttgatcttagcttctatgcttgaagcatttagctttgtttatctctcttttcttatttttggtggtgtagcattggcgcgtttcttcggttcacgtaaaaatatcgctaaactgggaaatggtattgttgggctattttttatggggtttgccaccaaacttgccacactctcctcttaaatagacgtcctttagtgacttaaataagaggctgttgttatcaatagcgattatctttgtagtaatcgctatttttcccccattactatcttgatcagtaagtcagccccacagggtggcgattattttacttagcagtttcgaaatgcgctatgcttctgttatcattgtccgcttatcatttccttgcaataagtggtgattaaattttgctttttagctttattcgtttaaacgcatagatattatgttattccgataaagcacctcacgcaacaaattgaaaataaagcagaaaacctctttaaagtaagttaaaaaaccttagcaacgatatagaaccgtaaaaaatgagcatcccaaaagagcaatataattttaacaaattacaaaaacgcttacgccgtaacgttgggcaagctatcgctgattttaatatgattgaagatggcgataaaatcatggtgtgcctttctggcgggaaagatagctatactctcctatctatcttaatgaatttgcaaaaaagcgcgccaatacaattttccttaattgccgttaatttagatcaaaaacaaccgggcttccctgaacatattttacctgaatatcttgagcaactgggtgtagagtataaaattgttgaagagaatacttacggtattgtaaaagagatcattccagaaggtaaaaccacctgttcactttgctctcgcttacgtcgtggtattttataccgtacagccaccgaagttggggcaacaaaaattgctttaggtcaccatcgtgatgatattttagaaacgctgtttctgaacatgttttatggtggaaagctaaagggcatgccacctaaattaatgagtgatgacggaaaacatatcgttattcgtccattggcttatgcccgagaaaaagacattgaacgttttgctcaagcaaaaaatttccctattattccctgtaatctttgtggctctcaacctaacttacagcgccaagtgatcaaagagatgctaagagattgggataaacgttaccctgggcgcattgaaaccatgtttagggcaacccaaaatattgttccgtcgcatctatgtgatacccaattatttgactttgctaatatcaaacagggtgatgagattattaacggcggtgatctagcatttgataaggatgatattccaacaagccctattctttccgatgatgaagatgagcgtcctgattttagccaagctagattggatgttgttgaggtaaaataagcatagccagtattatccctagcaaaccatcgtcgttgcgctggggtttaatatgctttacttatgacgaaaataataagcaaaaaaaaaccgatgtttatttaacatcggtgtaataatggtcaattattctgtattaagaactcaatatgagaaaaactacaattatggagcacaacgttcatcgctcaacgttgtattcacctgcgagagttataatgccagatgttggcatttaaaaaattgatatatctcaaacagagttagagaattcttttttaaatccatttagttacgattaatttgctgaaatttcacaaccacctactacgctttaaccaccaagcaacaatcacaatcaagaaaaacagtgaaaagcaaaatatagcaaagccataaggaaattcattaccggggatcccccctaaattaaccccaaatagtcctgtcaaaaaggtcgtgggcaaaaatagcatcgccattaatgacatggtatatgttcgcctgttcatcgcatctgccatcattgaagtaatttcatcagcaataacggctgtacgagaaatactactatctaaatcttctaatcgacgcgagagacgttctgatatttcaaccaagctaatgcgatcactgtcgctcatccaaggtaatttttcgatagagagtcgggagaatacatcacgttgtggcgccatataacgacgtaacacaatcagttgcttacgtagcaatgccaattcacctcgagccggaatttgctgatcgaggatcatatcttccaactcaattaattggtcatgaagtgtttcaacaaaatcacctatttcatctgtcactgcatcggccatagtgatcaaccaactaccactattttctggaccatcacccacttctaaagagtggatcaccgaatcaacggaattaacgcgacgatgtcggctcgaaataatcatttgaccattaatataaatacgatacgcaatcagttcatccggccgatcatcggggttgttattaatcgtttgcaaattaataataaccccttccccgatacgctgtgccttaggtcgaacattttcagctaaaagcacatcttttgcgataggaggaagtaactcagtctgattaatccactgatcacttttgggtttacgataatcgagatgaacccaaaaaggcctttcattacttgctatgctattagccgtgatcggcataattccgccatgcccattaagctgagccatatagatagcatcagaatcttcgattatagcgttattgacacttttcattattcgtcctccttgataccatcatttaaaatataattttatgcttttttctaaaatcatgtaaacaatcaataatattgcctttatttgattatgttgcaagaggttaaatcaagccactatttagcctagattaacgccatcacatccttccatctacaacaacattattgagtaaaatattttctactttaagatttttacactaaaataagcattaattattaggttatgatagatttttcaatatatgcctatatttaggttatcgattagcactagatattagtcataaaaatgaaatttacttaaaataaacgcaaatatttaattaatttgtcgcccctgaaataaggctactaatatgaaaaagtttctcaccattcctttatttttacttttagcaggatgcaatacagcgacaggaaccaacacccaagttatgaacgattcgacaaaaacactacttattgactctcagctttatgattgtgttggtgttgcgccaatgaaatgcatgaaagtaaaagaattacctgctggtgaatggtctctcttctatcaaaatatcgaaggatttgattaccaagcgggaacgcagtacaaagtaaaagtcaaagttacagatattcctaatcctcctgcggatgcaccaagcatcaaatatacactggttgagatcttagataaaaagtaagtaactcactagctaaacaatggattttcggatccattgtttatttcgctattattacgctttcctttagctataaattataaataagatccaataataataacgattatttataaaatatcttatattatctaaaattatagtaattacccttctattaataccaaaataatttcttttaactcaataagaatgctagttttttttaagaatcattccaaagaaattaacttgaaatatgttattaactcactaaaaatatcgccatctccaacaaattagatacgcgataatgaaaaaaaatcttattttatttataagctttattttacctttctctccatcactacatgcttttgagaataatcaggcaatttatggcggttacatatatggaaaaataaaaaaccacaaagcaaatggtgcaataataagttatcactatggatccgatattcactggggaatgttactttcattactgcatatcaagtcaacacatcaaagccattttatagacgctagctcacttaagctaggcacaaaagatgaacatgcaaaggtttctgcattattaataggcccaacgtatcgaattacaccttctttggctatctacgcccaaatggggcctaaaaaattaaaatatcgagttgataaaagttattcaggcgttgcggtaaccgataccattatcgtcgacaccaccaatgtgatgtttcaagcgggtattgattatagccttagaaaaaatgtaggcattaatcttggctatttacattcagatactgagtcaaacaaacataatattagactaaatagtatccaattatccttaggctatcgtttttaatgttttataaatatgcgataacataagttaaaaataatcttatcaattttatttgttgttaaaatacgtttactgaccactgaaattataattataaagctatattaagtagttatacctataaataaaaagtataaatttatactttgcatcaactgcacgattagtcaaaacattcatgcaaaattatattaacataattttgcaatgtttattccttttgagtctccttctgtttcataacagagggattttttttctctatctctcttcccctaaaaaaaagtacgcaataatcattacgtactctttgctaatattttggctttcttatcttattgcctgtaacacttatttaatgctttataacatacagcatatggctataagcgacatcttcaggattctcaatgggataaccttttagccaaggtttgattagacgaccattagtatactgatagataggggcaataggcgcctcttccgcaataacctgttctgcacgattatagagacgatttctttcctcttcatctgtcgtcatattggcttggactaaaatctcatcatattgctggctctgatattttgggatatttccagcatgcttagaacctaataaagataaaaatgtggagggttcattgtaatcgcctatccatgacgctcttatcacatcaaaatcacctgaattacgactatcaatataagttttccactcttgattgcgtaagtttacctttacgcctaactttttcttccacatagaagcgacagcaatggcgatcttttgatgattttctgaattattataaagcagagagagagttaaaggattatgaggaccatagccggctgctgataacaatatttttgcttggctatctaattcatcctgactgtattcatcatatagtgttggctcaggcgtaaaattagccgtcacatcaggagtaaagcgattcgctgatttttctccagtaccaaggactttgtcagtaataatttttctatcaattgccatagctaacgctttgcgaacccgaatatctttggtaggccctgcttgtgtattaaatgcataatagtaagtacctaactgctcagggatatacacttgatcaggaatatctttcatcaatttgtgatataagtgtttaggaaaagactctgtaatatcaatatccccagctaaataacgtttagtcgcttgtgattcatgattaataggcacaaaagtgactttggttaacaccgtattgtggtgatcccaatagtaagggtttggcgttaacacaattttctcattcacaacgcgatcttttagtataaaagccccattgccgactaaattacctactttgatccattctgaaccgtatttttcgattgtgtgtttaggtacaggataaagtgaaaaattggtcgctaaactagggaaataaggaacaggtcgttctaaggtaacttttaacgttttttcatcaatggcttccacacctaacgcggttggttttaatttaccatcaataattttttgggcattctcaatagaagctagggatgcataccaagcaaaaggagaaagattttttggatcaactaatctttgccaactataaacaaagtcagaagccgtcaccttttcgccatttgaccatttagcattatcacgtaatgtaaaaatccaaacccggttgtcttctgttcgccatgattgtgccactccaggaatgggacgccctcgctcatcttctatcactaatccttcaaataagtctcgttgaacttgagcctccgttaaacctacggcattaatgggatcaagtgatgcgggttcatcttttaaatgtcgcactacttcctgttttttgtcgagtatcgttcctgatggcaccactgccgcattagcctgtgatatgagcaatccttgaacgacaagtgcacatgatataacgaatattttgcgcatgtctgtttcgtcctgtagtctataagcgagttaacttaataattataaaagcctgataaaaaggcacaatcactgattgcaaaaattttatcaattttaccgttttcactcttttattttagagatgtagacaaattttaatcatggttacgcattaacgaatattatcgttaataatttagtattaataatggttagttcaataagtaacaaaggagaacaacaatggcacatcaagtgactttacaaggtaatgcggtgactttagctggaaatttccccactgtaggccaaaaggcagccgatttttctttagtgggtaaagatctaaatgatgtttctttagcgcaatttgccggcaaacgtaaagtattaaatattttcccaagtgtagatactggtgtttgtgcagcgagtgttcgccaatttaataaagtcgccaacgaattaaataataccgttgtactgtgtatttcagcagatttaccttttgctcaagcgcgtttttgcggtgctgaaggtttagataatgttgtcacattatcaacaatgcgtggtgcggaatttaaagaaaactatggtgtcgcgattacgtcaggtcctttagcgggattaactagccgtgctgtgattgtacttgatgaaagtaacaacgttatctacacccaattagttgatgaaatcaccactgaacctaattatgacgcagcattagctgtactaaaataattgacaataacgttattcataccgagtaatgtaaaaaacaaacgggctaatatagcccgtttatttaaataaaaaccattaacacattgtaatataatattatttctctgttttatccgcttttttacttgttaaatcatattcacgtaatttatttgcgatcgcggtatgagaaatacctaaacgtttagccagtttacgtgtacttggataatcacgatataaacgccttaaaatagaagcttcaaatcgcttagtcatttcatctaacgagccttcaagcaaatcttcatcaaataaagtatccgcagtatgctcaggcaaggcgatatcttgaggtcgcaatgtattgcctactaactgagccatggcttgataaattgtatttcttaattgacgaacattaccaggccagccatattgtactaaataagcagataaatcaggggaaataacaggttttgatgctttctgctctaaacaatattgattaataaaatgcagtgctaacggcatgatatccgcttttctttcccgcaacggtggtagagttaatgtcaatacattaagtcgatagtagagatcttccctaaatagccctttttgtactaattcccataagtttttttgtgttgcacaaattattcgaacatcaactttaacttcgtgctcttcaccaacacgacggaaagtaccatcatttaaaaaacgcaggagtttaatttgcatttgtggcgacatttcgccaatttcatccagcaaaacagtgcctcgattggcttgttcaaaaaagccttttttaccttcgatagcattaggatatgcacctgccgcataaccaaataactcactttcaaccacatcatcaggcatagaggcacaattgaggcctaaaaatggctctctggctcgaggacttaataagtggcaagccttagcaaatagatctttgcccgtccccgtatcccccactaataataaaggatcatccatttttgccattttcttagcgcgttcaactaattgtttcatgggggtgctaacagcaataacttgttcaaatcccgaattatcattaacaattaatttcggatgctcatgaattattccgcgatatttcaataaaatgagtgcaccaacacaatgattaaactgattatcatcagtcagttttattggcacaatctccatatcaaaatgttgtttttttaatttgatggagataatttcagcatgaggatctttttgttctaaccagcgatggatattaaagttaggtatcagttggttaaaagatttttcatttttatcattttcatctaattcaaacagatgccgtgtagctgggtttaataacttaatttgacctttggtattaatagaaaagacagggacaggtactgattctaatagtgtccacatagctcgatgctcttgctctgatggcataaaagccacagtacgaacatcgataaccccctcaattcttctgatttcagccattaaaggttgaaatatattaaaatcgatttgcgaaaaatttagataaataagaccaataggaaagatttcaattccacgcaaatcgatattttttaatacaagcagatcgagtaattcgcgggttaacccgatgcgatctttacaggtaacttctaagcgcattttaaaccttcttaatactgagtgcccctgaactaattgctgatattatacattaatatcaattaaataaagggctttgtcagcaaaagttgacactattagcatttatttttacacaaaagaggtgatattttgattataaatgcttttttaacgcttttaaaaaattaaaacagaaaaatgttgaaggttgaatgatctcttttaactcataagcgataaaatgcttgatcctttccaataaaaacataagttctcttcttataaattttttgattgtacaacaaccatgagaaaaacaaaaaatgagataatctagtgcatatatcgctgctttctttttattattgttttttacatactcaaagatctgtgccgtttctttaattggtgataatagagcttgcttttgttgtgcatattttattttatcaattgcatcatccaaaataggcgttaaaaaggccaattgacggttaatatgagtaatattcaaagaagaaccaatataaaacttgcgtctttgttttgaaagtttttttattgttccaatcttcatttttctttcctcgtactttagatataaactaatataaaaacactattatataaaatactaaccagctaataatttaatattaaacatcatggcagttatacatttatattatgttgacgctatttatcatactaaagtaaataagctttactatcaaaaaaagaaaaaacgttagctaaatgttaaaaaaagaaataaaaacaaacaaatacaatgagttaaccaagcaccttaaagctattaatctttacttataactatttttttaccaatgtaataccaactaactttacaacaataaaatgtatattttttgatagaaatagattattcccttgcactcatgcacacatcacttttatatacactaacaattaatttagcgataaaaaaacctcaacaataatacttattgttgaggctattcaatttatattgaattaaagaatatattgataggtaactcactctttcttcttattacctaatgtattttttaattgaccgataagctcttttctaaagtcactcaatttaggcttattatcaatccagggtaatggacggcataactccattgctttaattcccaatcgggcagttaataatccagcgccaataccttgagcagcacgcgtggataaccgagcagccaaatcttgtgaaagccaatccattcccacttctctcactaattcagtcgccccagcaaacgcaatattgacgagtaccaagcgaaatagctttagtcggctatagtaaccaagttcaataccatatatttgtgcaatacgattaattaaccgaatatttctccaaccaataaacgccatatccaccattgctaatggacttactgcaatcataagggttgattccgctgcagaacgactaatttcagcccgtgcttgcttatctaaaatcggttgtactaattggctatataattctaaaatttctctatcgttatgcgtatcatgtaatgtactttgccaacgaatataagcaggatgttgtgaattaatacctgcttgtttggctaaatcttcacaaaaagggcgaccattccctattgcatgactatagagtaattctctcgctttatcacgctcgtcagcccgttggcgtaaacgataaatacgacgccactcagtaattaccgatcccatacccgcaataacaattaatcctcccgcactggctgcgcctaaagcaatccaatcagaatttatccatgattgatagatccactgtcccgcttgagcaataacactaacacctaaaatagtactcgccactgttattaagcgtttccataaactttttctaggctttagggccgattggatctcaccttctaaacgcccttcattttcctgtgcctctaattgcggattgtagggaacaaattgttcatcttgattgaaatcaagccctttttttaagctaatttcttcgttttgtaaggttgattgtttaaaatcaatacgtgattttaatggctcattcattttagtttatcccctaataaaaactccaaggcactatccatacgaatatggggaacggcactgtctctcgatatttgttgaggccggaaagattcaaaactaaatccttgcttttgccaaaatgccttttcaggcaatctcttaggaacttctcctggaaaataaacgagcggctgattatccgttagtcggtagccttttacggctgggattttttcaccatgatgatcgacaatgccactttctgtggcagcaatagaagcaagccccatacaatcaatgcttattccttcaaaaatagcattctgtttcgcatcttgaataagttgctgtaacaaagagactaaattttcatgctgatctggcgtgatatggtcagccttagtggctgcaaatagcagtttatcaatacagggggagaataaacgtcttaataaggttcgtttgccataatgaaagctgcgcattaattgtgtgagcgcttgtctcatatcattaaaaacatccgcaccttgatttaggggttgtaggcaatcgactaagacaatttgtctgtcaaacccttgaaaatggtcgcgataaaatccttttacaatatgttgaccataatattcatagcgcttttttaacataccaatattcgtttttttatcggcattttttaatttagcactatcgtattgcgttaagtcagcccaagggaaaaattgtaaaacaggcgcgccggataattcccccggtaaaacaaagcgtcccggttgaataaaatgtaatccctgttttttacaggctaataagtattcagtataagctgcggcgatctcggctaacagcgtttcatcagcaggggcaaagggatcacatttttttattaacgactgccactgttgcacaggtgccgttcgttgttgattaactctattcatctgctcagaccattcaaaatagtcttgctcaagcataggtaaatcaagtaaccattcaccgggataatcaacaatttctaaatagagcgatgaagtttcttttataaaacgcgttaaagactcatgagagcgatagcgtaattgcaaacgtatttcactgacacccttagtgggaacaggccaactaggtggcgtatggtaaagtgactccatagcttcatcataagtaaagcgtggaatacttaagttatgttgcggtatacgtttaacccctaataactgttggttgcgtgccgcagaaaataaaggtaaacgcgccccactatgtacattggtgagttgattgactaaagaggtaataaaggctgttttaccactgcggcttaaccctgtaacagcgaggcgtaaatgcctatctacgcctcgattaatcagtgcagttagttcattttgtaagcgtttcatgtttctcccaagacacgtgacgcgataacttatctagccccatttttatcataggctcagctatcaatagaaccaaccaacgtaacggtttataactcacacgttttaatataccgccggttattgcggctggcccaaataaagttaataacgttaaagcaaatgttaccccttttttcgcccatttagtgagtttatttgttttaacggttgtcggtatcaaagtggaattcatcattcctccttaataagcaaatggtttatatccaaataaagacgctcctagtattggagcgtcatattagattaagtggcaagaaaattataaatcttgaaagcgtttattgagctgataagtcgaagaagtaatataacgttccatttgttgtaaacgtttttcaccttttgttaattgactatccacttcttttaaaatagcttttaaatcctcttgctgttcctgatgttggttataattatcaggtgcaggctccataaagaaacttaaaacaagataaacaacaatggttaagccaaaaaaaccagcaaagagtgcaatcaccgcaataaccctgactaatagcacaggaatattaaaataatgggcaagcccagcacatacgccacggatcatgccttcttgtggcaagcgatacaatgatttgctctgcatcgtcattatgattgcctccagttaggatgttctgcatcaagaatatcttctaatgtcttaatgcgttcctgcatttgctgagctttatccaccagcgcgctcagtcgctgcatttcttgttgggttaactgaaccttccctccccctttttggctgttatagtgcaaccataaccaaataggaagaataaataacacaaaaattgtcagtggtattcccagaaatatatagcccattacatatcctttataagatggttattacgcttgctgttactctttattagtattgattttagcttttaatgccgctaattgcgcgctaatttcatcatcggctttcagctcagcaaactgttgttctaatgatttttctttacctaatccatagctttgcgcttcgccttccatatgatcaattcgacgctcaaattgttcaaagcgcgccattgccgcatccattttaccgctatctaattgacgacgaacctgacgtgaagagtttgcagcttggtggcgaaccactaatgattgctgtttagcacgcgtttctgtcagtttattttctaattcactgatttcacctttaaggcgatctaatgtttcatcaatgatgattagttcatgttttaaggtatcgcacattgaagcaatacgttgtttttcaattaacgccgcacgtgctaaatcttctttatctttaatcagcgcgagttccgctttatcttgccaatctttaatttgtttttctgcttgctcaatacgacgctctaagctttttttctctgctagcgtacgtgcagaagttgttctgatctcaactaacatgtcttccatttcttggatcattaagcggatcattttttcaggatcttctgctttatccagcaaagaagcgatgttggcattaataatatcagcaaaacgtgaaaatatacccatgatgttatccttaatagctatgataaataatagccttgagtgttgattaaatagcgttattaacaataacgcccagttgctatagttaatacaatttgcgtgccaacttttcaaaacaacttaacacattaataaataacattttatttttcctcgcctattttttacactactgatagactggtgagaaatacctcaatatggtgattttaaccaatgcaagagaatttagagacaataattggtgttgatagtcattttatcgatgttttagaacaaacctcagccctcgctcaactcaaaaaaccagtattgattattggtgaacgtggtacaggtaaagagcttatcgctcatcgattacactatttatcaccttggtggcaaggaccatttatttccattaactgttcggcattaaacgataatttgcttgattcagagctgtttggtcatgaagcgggggcatttaccggagcgaaaaaccgccatcaaggacgttttgagcgtgccgatggcggctctctttttcttgatgaactagccactgcaccgatgctggtgcaagaaaagttgctacgcgttattgagtatggccatttagaacgagtgggaggtagtcaatcgctgcatgtcgatgtgcgccttatctgtgccactaacgcagatctaccggcaatggcggacgagggtaaatttcgtgctgatttactggatagattggcctttgacgtaattcgcctgccccctttaagagagcgtaaagccgatattatgctactggctgaaaactttgcgattgctatgtgccaagagttagggttgccctttttccccggttttagtgacaatgcccgccaaattcttttagattaccgttggccggggaatattcgcgaactaaaaaatgtggttgaacgttctgtttatcgccatggcaccagtgagcgtgaactggataatattattatcgacccttttgcgcgcttttcgtcttcaaccatagctgagcaacctcagcctcaaaaggagatgatcttttcattaccgccattaccgctagatttacgccagtggcaacatagcacagaaaaaaacttactagagcaagcattgaaagagagtcgttataaccagaagatggcggcagaaaaattagcattgagctatgatcaattacgcggattaataaaaaaacatcacataaaattgtcggtctagttttgtataagatgagcaaagacagaatgaaatacagacaaaaaaaaagccagcacccgagctggctagtaaaataatactggaagcaatgtgagcaatgtcgtgtccttgtgcgaaaaacctctatcgccaaaggacaatacggatgataatctttatcattagcgtttgtaaagctttttattgagaatttttctcaatttgttttttttgacaattttgggctagccagttttttaagttacaatagccaaatcgtttatctaaaagacataattatgcgccctattttacttattagtactatgctactggcttcaataagtatgacttgtatggcagagatagctaccaaagctacagagctatctgtcgcgcaagagcctacaaacattcatcaaaatggctttgtctattgtgttgatggcagtgtaaatacctttaatcctcaactttcgagcagtggattaattattgatcccctagccgcgcaactttacgatcgtcttttagatgttgacccttatacctatcgtttgatccctgaaattgccgctcgttgggagtctctcgataatggcgcaacttatcgcttttatttgcgtaaaaatgtgtcattccagacaacaccttggtttacgcctacacgtaaactcaccgcagacgatgttatctttagttttgagcgcatgttttctgccaataatccttataatcaagttaatggtggtaaatacccctattttgatagtttaagtttggcggataatatcaaatcaattaaaaagttaggcaaatacaccgttgaatttaatctaaaatctcctgatgcttcatttttatggcatttagcaacccattatgcgcctatcctttcagaagaatatgccagtaaccttgaaaaatcgggtaatcaatcgcaacttgattggaaacctgtaggctcagggcctttttatcttgatgaatttcagccaggccaatttgttcgattactgagaaatgagcaatactggaaaggtcagcccaaaatgcaacaagtggttatagacacgggtgcaggcggtactggacgtatatctaaactcttaacgggagagtgtgatgttttggcctatcctgcggcaagccaattaaaggtcttacgtgatgatcctcgtttacgccttacattacgttcaggaatgaatattgcttatcttgcgtttaatactaataagccaccgtttaacgatctaaaagtgcgtcaagccatcgcttatgcgattaataatgaacgactaatgggatctatttattacggtacggctgaaacagccgcatcggttttacctcgtgcctcttgggcttatgataatcgcgctaaaattaccgaatataatcctgaaaaatcgaagcaaatattaaaagagttgggacttgaaggacttaaattaaacctttgggtccccagtgctccgcaatcttataatcccagcccgttaaaaatggctgagttaattcaagctgatttagcccaagtaggtatccaaatgaatattcgacctatagaaggtcgctatcaagaaaccagtttgatggatagaactcatgatatgactttatcaggatggtcaacggacagtaacgaccccgatagttttttccgcccattatttagttgtgcggctattagttcgcaaaccaatttaagtcattggtgctcaccggcatttgacaatgtgctacaacaggcgctttatagccaacaactggcctctcgtatagactattatcaccaagcacaagatattttagcgcaagagctaccggttttaccattagctaattctttacgtatgcaggcttatcgttatgatattaaaggacttgtattaagtacatttggtaacgcttcttttgccggtgtgtatcgcgaagcagaagttgatgaggatagtcacaaccaagaggctacaacaaacccatgattatctactcgatacgtcgcttactgttattaattgtgacgctctttttcttgtcactggtgagctttagtctcagctattacacacccaatgggccgttaagtggtgcttctttatttgatgcctactttttttatacccacaatatgttccattttgattttggaatttcttcaattaatggcgaacccattaaagcacaacttattgaagcatttcctgccactatggagttatgtgcactggcatttatctttgccctgcttatcggcattcctgcggggatcatcgcgggtgtatggcgcaataaacctgcagatacttttattagtcatctcgcacttttgggcttttcagttccggtctttggtcttgcattattactgacgcttttcttttcattaaagctaggttggctacctgtttcaggccgtattgatttactgtataacttacagcctataacggggatcgcaatcgttgatgcttggctatcggattcgccttatcgtcaacagatgatcataaacgttttgcaacatttaattctacctgtgactacactagctattgctcctactacggaagtcattaggttaatgcgtaatagtacagaagagatcatggtcgagaattatgtgaaagcagcggcaacccgtggcttatcacgctttactattattcgccgtcatattctacataatgcattaccccctattattcccaaattaggcttacagttttctaccatgttaacactgacgatggtgaccgaaattgtttttaactggccaggattaggccgttggctagtaacggccattcgccaacaagactattcggctatttcagccggtgttatggttgttggttcaatggttatcatcgtcaatgtgttatcagatattgtcggtgcgatgagtaatccaatgaaacacaaggtgggatatgcctttagatagccagttttataaagagaaaaaaacaccatcaccggctgcggtgatttggcaatgtttttctaaagatattctctccatggtgggcttttatggtgttatcttcctgttaatattaagtattgttggtccttatattgcgccttatgcactcgaccaacaattcttcggtcatcaattaacaccgccttcttggtatcaaaacggtaatgtcaccttcttttttggtactgatgatttagggcgcgatgtctttagccgtattttaattggtacgagtatgacctttggtggcgcttttattgtcacctttgcggcgacactgatgggattaattatgggttgccttgcaggaatgacccacggcctaaaatccgcagtgttaaatcatattttagatacactgttatccattccatcactcttattagccattattgtggtcgcttttgtaggggcaagtttagagcacgccatgatagcaatttggctagcactactcccccgcttagtgagaatgatctattcagcggtaaatgatgaattaaataaagagtacgttattgcctcacgtcttgatggtgcatcaaatatctctattttatggtataccgtattgccgaatattaccccagtattggtttctgaattaactcgggctttttctatcgcaatattagatatcacggcattaggttttctgaatttaggcgctcaattaccttcacctgaatggggggcgatgctcggcgattccctagagttaatctatgctgcaccttggacagtccttatccccggagccaccattatgatcagtgtattacttgtcaatttattaggggatggcttacaacgtgccattaatgagggggtggaataatgccgttattagacatacgcaacctaactattgagtttatgacacccgatggcccagtaaaagcggtagatcgcgtttccattaccctcagtgagggagaagtaagaggtttagtcggtgaatctggctccggaaaaagtttgatcgctaaggcaatttgtggcgtgactaaagataatattaaagtgactgcggatcgctttcggtttgatgatattgatttacttaaattgtcaccaagagcacgtcgtcgggtaattggtcataatgtgtcgatgattttccaagagcctcaatcttgtcttgatccggcgaccaaaattgaacaccagcttattcaagcaatccctggttggacatttaaaggccactggtggcaacgttttcattggcgaaaacgccgtgcaattgagttacttcatcgggttggtattaaagatcataaagatatcatgcgtagctatccttatgagttaaccgagggtgaatgccaaaaagtgatgatagccattgccattgctaaccaaccccgtttactgattgccgatgaaccaactaatgcgatggagccggcaacgcaaacacaaatatttcgtttactcacccgtttaaatcaaaataataatatgactattttgttaattagccatgatttgcagtggatgagtaaattagccagtaaaattacggtcatgtattgtggtcagaccgtggaaaccgccatacctgaagaactattggttaccccctatcatccttatacacaagcccttatccgctctattcctgattttactaactctttgcctcataaaagccgtttaaatacgctacccggtgcgatcccctctttagagcacctacctgttgggtgccgtttaggcccccgttgtccttatgcacaacgtcaatgtattgaagcacctcgattacgtacatttaaaaatcatgcggtggcttgtcatttcccattaaatgtggagacgacagatgttcgataaattacttgaagtcaaaaacttatcaaaaacatttcgttaccgtacaggattattccatcgccagcagttgaaagcggtaaaaccggtgagtttcactcttgaaccgaagcaaacactggcgattattggcgctaatggttcaggtaaatcaacattagctagaatgttatccggcgttacagagccaacggggggtgatatttttataaacggtcatcaattaagttttggcgattactcttatcgtagtcaacgcattcggatgatatttcaagatcccacaaactcactcaatccacgtcagcgtattgggcaaacattagatttaccattacgacttaataccgaacttagtggcatagagcgagaaaaacgcatttatcaaactttgcggcaagtaggactattaccagaacatgctaattactatccacatatgtttgcctcaggacaacgccagcggatcgccttagctcgtgctcttattttacagccacaggtgattatagcggatgaagctattgcctctttagatatgtctttacgttcacaaattattaatttgatgttagagctacaagagacacatgaaattgcctatatctatgtgacacaaaatttaggaatgactaagcatattagtgataaagtcatggtgatggataatggtgaagtggtcgagcgtggtaacaccgctgaggtattagcatcacctttacatgaagtgactcgtcgattagtggctagtcattttggggaagcacttacggcagaagcttggcgacaagatttaccttaatattaaacagcattaacatcatattaattgtttattatttcacccttttccttcaactcctcggaggtgcaagggaaattaaacaaatttacaaatgtcgtggtagaatcagccacgatttattaacaataagcgtgataacctaacagataaataaaattctgcatgatgttattatcgcaatttacgaacaaacaaggatacagctatgggctttatgaccggcaaacgcattctgattactggtgttgcgagcaaattatcaattgcttatggtattgccaaagccatgcatgatcaaggcgctgaactggcttttacttatcagaatgaaaaactcaaacctcgcgttgaagagtttgcagcctcattaaattctaacatcgtattagagtgtgatgtgtcaaaagatgaaagcattgacgcaatgtatgcagagctagcaaaagtttggcctaaatatgatggttttgttcactctatcggtttcgcacctgctgaccaattagatggcgactatgttaacgctgtcactcgtgaaggctttaaaattgcccatgacatcagtgcatatagctttgttgcaatggcaaaagcaagccgtgcaatgttaaatccaaactctgcattattaacgctgacttacctcggtgctgagcgtgcaattcctaactataatgttatggggttagctaaagcttctctagaagcaaacgtacgttatatggcaaatgctatgggtcctgaaggtattcgtgttaacggtatctctgcaggtccaattcgtaccttagcggcatctggtatcaaagatttccgtaaaatgttaaatcattgcgaatccgtcacccctttacgtcgcacagtcactactgaagatgtgggtaatactgcagctttcttatgctctgacttatctggcgggatcaccggtgaaatcattcacgtagacggtggttttagcattgccgcaatgaatgaattagagttgaaataatttccctttatttcattacattctttctaaaaacctcgaaattcttcgaggttttcttttttcatgaataagttgtactgttcacagatttacaaaagcctattttatttgccagatttgcgtttgctaaattcttataacgccttattatctaatgttagtgaggatatttcttatcttcacgggtatcaccactcattgatagggagttatttaagatgaaattgtactacacgccgggtagttgctcgctttctcctcatatcgttctacgtgaaacgggtctcgacttttctattgagcgcattgatttacgcaccaaaaaaacagagtcagggaaagattttcttgccatcaaccctaaagggcaagttccggttcttcaattagataatggtgatattttaacggagggtgttgctattgtgcagtatcttgccgatctgaagccagatagaaatcttattgccccaccaaaagcattagaacgttatcatcaaattgagtggctaaactttcttgccagtgaagttcataaaggctacagccctctattttcatctgatacgcctgaaagttatctccctgtggtaaaaaacaaactaaaaagtaaatttgtttatattaatgatgtactaagcaaacaaaaatgtgtttgtggtgatcactttactgtggcggatgcgtatctgtttacgttaagtcaatgggcacctcatgtggcgctagatttaaccgacttaagccatttacaagactatctagcacgtattgcacaacgtcctaatgtgcatagtgcactagtcacggaaggattaataaaagagtaagattgctataaaggcgagtctcattaataaacataaaaagcggaaattaatgacttccgctttatattaacaatatgattaatctaactgcgttgcacagaagttatgggttgggtgcaccatttgatcttgagcggcgacgagttgtaactcgtactcattcatctctttagtttttaacatcacttcataaacagcagcagcaacatgctctaatgccgtttttagctcaacaccttttagtaaatccaccagcattaaaccactggttagatccccgacaccaacaggctgacgttcaccaaaatcaaccagcggtcggctcacgtgccaactgtgatctgcagtcaccagtaacatttcaaagcgatcatgacgaaagcctgctcgtgataaatgttttactaatacaattttaggcccttgctggcataattgacgggccgcttttacacattggtcaacattatgcagcgttgctccaccagctaatgtttcaagttctaataagttgggtgcaataatatcactgatgggcaaagcatcttcacaaagtacgccagaaacttctggaggcacaatacaacctttttcaggatgtcccataaccggatcacaaaagtaccatgcgttaggattagcttgtttgactttttttacaatatcaacaatgcgtcggccttgctctgccgagccaagataaccacttaataccgcatcacactgtgctaatttaccaatagcagcgataccatcaacgatctcagtgatatgctctgccgacatcacacaacccgtccatttttctggatattgtgtgtggttggaaaattgaaccgtatttaaaggccaaacatttacccccatacggcgcattggaaattcagcagcgctattacctgcgtgaccaaaaactacatgagattgaatagagagtatatttttcatgacataaaccgattattgtgaatacacacaacacccaagctttattatcataggcgaggtatacacatttatttattgttatcaaaaaagggcaacctactgttgcccttttgttgtcaattatttccagataacaaggcagtaatgttttttaccgcgacgtaaaatggaataatgaccaaataagaaatctttttcttcaaagacgtattcaggattatcctgtttttcgccattaatagatactgcgttagagccaatcattgtacgagcttgaccacgagaaggaactaattctgcattgaccagtgcttgttgtaaatcattgcctttttctaactcaatagttggcataccatcttgcgctaattgttcaagatcagcttgcgttaaatctgcaatagctcctgaaaataggctatcggtaatacgtttagcggcagttaaaccttcttcaccatgaactaaacgtgtaacttgttctgctaacacacgttgggcgcgaggtgcttgaccgctgtttttatcttcctcttccagtgcattaatctcctcaatgctcataaaagtgaagaattttaagaagcgatacacatccgcatccgcggtattgatccagaattggtagaatttatatgggctcgttttcttcggatctaaccaaacagcaccaccttctgttttaccaaatttagtaccatcagatttggtaattaaaggtactgtcataccaaatacttgtttttggttgaaacggcgagttagatcaatacccgaagtaatgttaccccactgatctgagccaccaatttgtaactcgacaccgaggtttttgtttaatgacgcaaagtcataagcttgtaacagattataagcgaattcagtaaaagagatccccacatcgtcacggtttaaacgctgtttaaccgcttctttgttgatcatttggttcacagagaagtgtttaccgatatcacgcaggaaggttagcacatccatttgaccaaaccagtcatagttgtttgctaattccgcactgttttcaccacggtcgaaatctaagaaaggtgacacttgtttacgaattttttctacccactcgtgaacagtatcttgggtattcagtttgcgctcggtggctttaaaactaggatcaccaataagacccgttgcaccacccaccaacgccacaggcttatgcccggctagttggaatcgttttaaacacagcaaaggaaccaaatgccccaagtgcaggctatcagcggtaggatcgaagccacaatagagagcgataggaccttgctccaaacgctccactaaagctgcctcatccgtgacctgagcgataagcccacgctcctgcaattgtgtgattaggttcttgctagacatcaatgactccatcggtttattgttttttgtctatttaaaatataagtgaaacacaagtggtatagcataaagcgccactacattaagtaccagtagaaaaagcctttttgatacaaatttattagcccaattaaggtgctaaacgttcaatagaccatccttctggtgatttttggtatataaagcgatcgtgtagacgattttctctaccttgccaaaattcaacagagtcaaaagtgactcgatatcctccccagaaactgggtagaggtacttctccatgttgaaatttttgttttaactccaaaaacttactttcaagcaccccacgggcagaaatgcgagaagattgttttgatgcccaagctgctatttggctatctttaggacggctatggaaatattttacgacttcaaatgctgaaagtttctcagctttccctaaaaaacagacttgtcgctctaaaggataccaagggaagagtaaactgactctttggttatgttctaaatgactcgctttacggctacctaagttggtataaaaaactaaacctttttcatcaaagtgctttaacagcacaatacgttgataaggttgtccattttcatcaacggttgccacacacatggcagtaggatcacttaagcgagcttcacaagcttgcttaagccatttttcaaataaaactaatggctgttcggttaattcatgacggcgtaatccacctttcatatattcacgtcgaagatcagcaacatcaataaaatccagatctgtcatttttcactctctcttttgagatactgtgctcagcatatcacgcttatcgaggatttgtaggataaatcgcccctaaaattgtttctcgtgatgcccctgtaacagaaggtaaattgccgggttcatttgccattgttcgtgcggccaaccacgcaaaagctaatgcttccatatcatcgccactaagaccatatttgtccgttaacgagacttctgtacccggtaataaactagcaagacgatgcataatttgaccgttttttgccccgccaccacacaccaataaacgctcacatccaccattgagttgtacttgctgtgcaatactgatagcggttagctctactaaagttgcctgtacatcctctggaaatacattgggtactttagccaaatgataatgtaaccattgggtattaaaatattctcgtcccgtactttttggcgctgaacgagaaaaatagggatctgccagcatttcctgtaataattgggtattcacatttccagttgctgcccattgcccattatcatcataggctgtctgattatgaacccagttccaactgtctaacagcatattgccagggcctgtgtcatatcctttcactgcaacgccaggtaatagcagcgaaatattggcaataccaccaatatttaacacaatgcgtttttctgtaggatgacctaatactgcaagatgaaatgcaggaaccaatggtgcaccttgcccaccatatgccatatcacgacgacgaaaatccccgacagtggttattcctgtcaaggcagccactctattgttatcaccaatttgcatggtaaacgggatatcactttctggctcatgccaaattgtttgaccatgacatcctatcgccgtgatatcagcagcacttaatcgcgctttcgctaataattccataatagcttttgcatatagctcacccagttgcgcatctaataagcctaactcatgcaacgtcacaggttggccttggcaaacggctaaaatgcgttgacgcaaggtttgaggataaggtaaaaaatggttggcttgttgggcaaccagtttattactaatggcggccaataccacatcaacaccatctaaacttgtaccagacatcacaccaatgtatcgccctgctttcatgtccttttccttataatcaagatgatgcaactttttaacatataatgttatattctttttttcggaaatctcttcagtgtttacttgcgctctttactatatagtaagaggtatacgattaaaatcagtgtcgacatatgcaaaaaataagctataactgatattaaattaaattgatataatctgaaaaattattatcagatttccattaggagtaattatgtttaagcatttacttgttggtctttttgctgtgacaacgctggctggttgtgtaaatacaagctctttatcaggtgatacttatacagcaagtcaagctaaacaagcacaaaacgtaacttatggcaccattgtttcagtacgtgcagtaaacattcaagccggtagtgatgaaaatgttcttggtgctatcggtggtgccgtattaggtggtttattaggtaatacaattggtggtggtacaggccgtaacctagcaaccgcagcgggtgctattgctggtggtatggctggacaacaagcacaaggtgctttaaacacaaccaagggtgtgcaattggaagtacgtttagatagcggtaaaactgtggttgtcgtacaaaaagcagacaatactgcctatagacaaggtcaacgtgttgctgtgattggtaacggcaataatctcaccgtttctccacgctaagtttatttacttgaggtgtgtgataagcaaaacaggcaaccattctagttgcctgttttattaatagaaattattttacttataataaccagttttataacttattaattaattcaaacattgcattatctatctttaattaatgataaaaatcactcgtcttttatcatcaattattaattgataacgcttttattataagatcaacaatagacttcatagataaaatcatcttatctaccctctagtagaattataataaatcctttgaaattaaataataaatagaattattacaaataaaaccattagaaataaaattgctgtaaattagcccaatttaattagtcatgtaatctaattatatttttctctagctttttaataagataaatcaagttgtctatttcttccttctttataccacttaatatttcttgacgtgtcttctcaataactgcataaacttctgaaataaaaggttctgattcttttgttaacgttatacgctttgctctgcgatcacttgaacaagtatgtctacaaatcaattttttttcttctaactgatcgagagttctcactaatgatggttgttcaataccaattgctttagccaattggatttgagattgttctggaggcagttgactaatattatacaacgttacccaatgagtttgggtcaattttaatggcttgagtcggtgatcaattaaggcacgccataatcgaactaaacgcgctaaatcagctcctaatgttgattccacttatccctccttaaattcgcttttctttcagcttttacaaagtttagatatgttctttaaaaacactattttgtaaattacattatttattgattgatgagccgacctctttatcttatttttataatattagaatcctatttattagataggaaattatttttaagatccaattatgtatatttatcgccacgaatgaatctctataaagaataaccttgttataaaaactaatctatatttttttacataataatcattattatttcacaagaaaagccgagaaaacaaaaaaaccttacaattcacggaattaaaaaccattaacaaaacaaatatttacaatgaatattatttaccttaaaaattaaataaaatgaactaactaaatacaatcaataaactaattaaattatattaaaacgttagttttattttaaaatttaaaaataaataataaatttaaaataaatccagctgttcattctctttttctgtttcagacactgttttttgttgagctcttaaatatcgttgtcgacaaagtctcaatacatttcgtttttcttgttgactcatcgttgaccaactaaagcgttcttgacgactacggtaacaaccaatgcaatacccttgtaaattagattcacatcgaccaatgcaagggcttgggatatcgaagaattctaattgttcttgcattgattattctccccaattatttgttactatagagtatagtaaaaagagatattatctgcccatttactacaatactgatgagtaaagcgtaaattgaactatagggctgtaacgcgttatagtacaacaccatcagtttatactgtcgggtgtcatatttaacaaacacgagaggtttatatgcgagtacttcataccatgatccgtgtaggcgatttacaacgctctatcgatttttataccaaagttttaggtatgcaacttctacgcaccagtgagaatgaggaatataaatactcgttggcttttgttggctatggtgatgaaagtagcggtgctgttattgaattaacctataactggggtgtgactagctacgaaatggggactgcatttggccatgttgcattaggggttgatgatgtagctgcaacttgtgaggctatccgtcaagcggggggtaacgttacccgtgaagcaggccctgttaaaggtggtacaacaattatcgcctttgtagaagatcctgatggatataaaattgaattaatcgaaaacaaaagtgccagtcaagctctgggtaactaaatattagtaaaaccagaaaggcattgtattgcttttctggttcctgattattattaatttctgatgtgctattttcatcggataagtacagtttaatgcctgataaaataaaccctaatgaattatgtaaccgctttcgaggttactatccagtcgttattgatgttgaaacgggtggatttaatgccaaaacagatggcttacttgaaattgctgctatcactttaaaaatggatgagcaaggttggttaaaacctgataatacattgcattttcatgtcgacccctttgagggcgcaaatttagagccagcggcgttagaatttaccggaattgatcctacaaatcctcttcgtggtgctgtcagcgaatatgaagcgttacacgccatttttaaaatggtacgtaaaggaatgaaagacgccaactgtaaccgtgcgatcattgtggctcataatgctaattttgatcatagctttgttatggcggcagctgagcgagcaggtttaaagcgtaaccctttccacccttttgctacttttgatactgcggctttaagtggtttagtactaggacaaactattttagcgaaagcctgtattactgcaggtatcccctttgatagtaaactcgctcatggggctttatacgataccaatcgtacatcattactgttttgtgaattagttaaccgctggaaaaaattaggtggttggccactaccaacgccctaatcaaacttatgtgtttggctgtgccatattaagcgacaaaaaagaagccagtgcaaataatgtactggcctctttttttaattacggtcaatttaaatcatggtgaaaaacgcaatggggattatgcttcttcttcaccacggtatttatctgcagtctcttttaataacttctgcaattcaccgcgctgatacatttctaagataatgtcacaaccaccgactaattcgccatccacccataattgtgggaaagttggccaatgagcatattttggtagctctgcacgaatatcagggttttgcaaaatatcgacataagcaaaacgctcaccacaagcagaaatcgcttgaacggcttgtgcagaaaatccacagcttggtaattttggtgatcctttcatgtataacaggatgggattttctttgatttggcgttcaattttttcgatagtcgtcatttattaagtccttacaacctttttatattcagtatgttttatattgaggaaaacatgaaagaagaataccactttatataagaaagctctatataagtttagttatgtatctaaatcaataaattacggataaatcaccctataattgatgagaaaacatacgacaaggcatgacgatctgggaacaaataaaataagattaatgttggcttagcgaaaaacgccgtaaaccctcgcccaatgtgaagtgcccccataaaaagcacctaaataagtgtataaatgcacattacagtaaagaacaccagataatgttttagtcgacggatatctgatgtccctgatcacacaaattttcaacgtcaatatcaatatctcgttaaattggatattgataaatttcgttatttaataggcttaacaataatatcccaacctgtagtacctgaagcgtggtaataataaccggcttttaattgctctggttttttacttggcccttcagcaactaaagtagatttcgttgagttattatcaatacgaattacaccaccgcgaatacgatctaattcattaccattgaacaaggtaatttgtggtgagaaatgcgcatcacttaaatcaatatggataaaagtgtgccctgcatcataagcggcttttaattctttatctgtaatgtctttaccattctcaaagggtaagtcaaaaaatgcttttggatcaattttagcagtcataaatactcctttttatgaataaacatcaatcattagttcaatttaaattatagataataattaaacattctgataaatatcctgctcacgctctgtaagatatatataaattatttatatattcaataaattaacttacccatcttttgttttgcttttattcaatagagatagaacaataagtaaaattaactaattgtttatatatataaaaatgagatgttatttctaatagggatctgccattatcatggactcgtcaaaactcgcatatttaaacttatgagtatttagtaatggaaatgattttactgtttctgattgtgggatgtataactggattttttgccggattgttaggaattggtggtggagccattattgttcctattgtgatgtatgttgttagccaacaagctatccctgcagatatggtaatgaaaatcgccctctcaacctctttttctgtcattatattttctaccgcctcttctgcttattcgcataataaacataaagcgattttatggtcacaatttccgctcctcgctgtaggcactcttctcggtatgctagttgggacattcctagtacaaaaactctcaaataccctattacaaattatcttttgtatttttatggcctataccatatatggattactgaccaagaaaaaagaagctgaacgtgttgagaatgcccaagatccggtggtttcaaaaccagcactgacaaccggtggtagcttagtgggttttatttcaagttttattggtatagcgggtggcaccataacaataccgctattaagccactgggggtttaatacccgtaaatgtattgcaacatcatcaatgctgggtgtgattatcgccactattgggactgttatggggatcgtttatggttggcaacaaactgaattagcagactattatttaggttttgtctatctacctgcttttattggtattagtattaccagtatacttacagcccctatcggcgtaaaagttgcctataaactacctattgccagagtacgccaaatatttgccctattcttattaatcgtcatggctaaaatgttatataccctgatattgggatagtgttttaacactttacctctatcttagtgagagatactcttatcaatataactaatctatatgttctatactaatagataaaagatatttagctgttatttcaatgaatttttgttaaaataattagcaaaatagtaacaacttagtgagttcatttgcctcattttatcaattcagttgaattagatggaatggtttaaggcacaaaacccgaaaatgataggataaaggagtacgcaatgtctttcgaattaccaaaattaccttatgcgttagatgctcttgagccacatatctctaaagaaacattagaataccactacggcaaacaccaccaaacttacgtaaccaacttaaataacttggttaaaggtactgatttagaaaataaatctttagaagagctcatcaaaactactgaaggtggtattttcaataatgctgctcaagtttggaaccatacattctactggaattgcttagcaccaaacgcaggcggtgcaccaacaggtaaaattgcagaagcaatcaataaagcgtttggctcttttgaagagttcaaaaaacaatttaatgatgcagctgcaaaaaactttggttcaggttggacttggttagtgaaaaaagcagatggctcattagccattgttaatacatctaacgctgcaacacctgtttctggcgaagataaaccactgttaactgttgacgtctgggagcacgcttactacatcgactatcgtaatgcacgtgtgaaatacttagaagagttctgggcactggttaactggtcatttgttgaagcaaatcttgcttaattgactgtttcagagatgggaaaaccatttttgataatctaataacaaagggcctagtgccctttgttatattgatatatttgattgctcactttggatagctaaaatttaagtaaataattagcaattaacaatcaaaacaataaacttgcatatattacgatcataaccagtgctgctactgcggtacttaaaccaaatttcagatccgtatccatctatttctccctcaaaatgattataatactcagattaaaccataatcttgtcatggttaattattattacatatcaagttttgctaaaatagcgactagagcacaatttataacattgattaatactttcacttttgagctagatcatacaaaattcacagctaatcgctaaattattgccagtgtttgccctatatatgactatactggcagttaaaccataaaatgaattaaaagagaccaatgaaggtcaggagttttccacaccatggcaacaataaaagacgtggcaaaacgcgcaggcgtatcaaccacgactgtttctcatgtgatcaacaaaactcgttttgttgctgagaacacaagagcggcagtttgggctgcgataaaagaattaaattattcgccgagtgctgtcgcacgtagtttaaaagtcaatcacactaaatctattggtttattagccacgtccagtgaagcaccttactttgctgaagtgattgaagctgttgaaaatagttgttatagcaaaggctacacgctaattttatgtaattcacataataatcttgataaacaaaaagcttatttagctatgttggcacaaaaacgtgttgatggtttattagtcatgtgttcagaatatcccgatcatcttctttctctcttagaaggttatcgtaatattccgatggtcgtaatggactggggaaaagcccgcggtgactttactgataccattattgataacgcattccatggtggctatatagccggtcgttatcttattgaacgaggtcatcgtgatattggtattatccccggccctctagagcgaaataccggaggcggtcgtttacagggctttttaaaagccatggaagaagcgaaaattacggtaaaagaagagtggattgtacaaggtgactttgaacctgaatctggttacaaagccatgacccaaatgctcaatcaaaagcaacgccctactgccgtattttgtggcggtgatgttatggcgatgggagcaatatgtgcagctgatgagttaggattacgtgttcctgccgatatttccattgtcggctacgacaatatccgtaatgcacgctatttcacaccagctttaaccacggttcaccagccgaaagagcgtttaggacaaatggctttttccatgttactcgaccgtattgtgaataaacgcgaggatgcacaaactatcgaagtacacccgcgcctagtagaacgtcgctctgttgccgatggtccatttattgattatcgccgctgatctccttcattaacgaagccattcctcatttaaggtttggctatcgcctagataatctaatagccaagttaatgccggcgattcgcttttatcaacccatgttagacagcacggactgtctggcaagggttgtgctaaggtaagggtaaccaacttaccttgttcgattaatggctccgctcggtgccaaggcaccataccaacacataatcctgctaataaacactcaagccccatatcccatgaaggtactatcattcggcgctgattatttaatgcccaagtatctcgttttggtaaactacgtgaggtatcttctaaacataaactaggataaggccgtagttcatcatcggttaatggatgtgccgcgcttgcaagaggatgatcagcatgacacacacatcgccacggcataaagcccatatctttaaaactataacgttcaccaataggtgaagctctagtggcaccaatagccaaatcaacacgcccgttcactaatgaatcccagacaccgttaaaaacttcaggataaacatagagttcgatatcaggaaaatggcgataaaagtccagaataagttgctgtgttctagccggtttgacaataccatccacggcaatgctaaactgcccccgccagccatttgagacttgctggcacatatggcgagtgtcattcatttttttgataacagaacgggcttctttaataaagatcttacccgcatcggttaattcaacatcacgatgccggcgttcaaacaaaggaacggcaagccattcttctaattgtctcacggtgtaactcaccgcggagggtactctgtgcaattcttgagcggctgagctaaaactccccgttctagcgacagcatcaacgacctctagcgagtattctgaccacataatatttattcctttgaatttttttcacagcattaaccaaatattcccgtttcacaagtaaaatcactcttagctacaatatataaaatgttttacatcacataacatagaaaattaaaatgactttaaagaattccacacaatcaaaaacaccttctctctttatggtgtatctcgcctgccttagtatgctgggctatttagctatcgatatgtatctgcctgcatttggtatgatgcaacgcgaattatcaatcagtgaaggcgccgtcagtaacagcttaagtatctttctatttggctttgctgtcgctcaactactttggggaccactctcagacaaattggggcgtaagcctattttacttattgggctaagtttcttctccctaggttgtctaggtatgctttgggtagacagtgctgccggtttactaaccatgcgcttcttacaagcctttggcgtctgctctgcagccgttatttggcaagcactagtgatagaccgttttgatgagtctcgcgctcaacacgttttcgcatcaattatgccattggtcgccctttccccagccttagcgccactcattggtgcttttctgttaaaccacggtggctggcgcatgatttttatgttgctgatggcaattactcttgtattaatgctacccacattgatgctaaaaaatattaaacaaaaatcagttattgatgcaggcccatctacagtatcatttttaactttgcttaagtcacctatctatgccggtaacgtattagtttacgcgtcctgtagtgcgggtttctttgcttggttagcaggctctccgattatccttgagaagatgggttattcaccacaagatatcggcttaagctatattccacaaaccatcgcatttatggtaggtggttatggttgtcgcattttattatcaaaaatgtcgggtaaaacactattacctttattgttaattggctacgcagtgagcatgacagcgttgttcttagtcgccaaatatacacacccaacattaacaacaattttaattccattttgtattatggctgtgatgaacggtgcttcttatcccattgctgtctctaatgcgctatcagcctacccggaagtgagtggtaaagctgctgcattgcaaaatgcgctacaattaggtctatgtagtttagcaagctttattgtctcagcctttattagccaacagccattaattaataccacagcgattatggcactcacggctattccaatggcgctgggttactttattcaacgtaataaatccgttagcaaacacacagttcaggcgacagaataacgccataccctgtttttaggaaaattcttaaaaaaggccatttatataaaatggcctttttattttctagagaaaacctatttacatctctatacttgttcaaacgcttaagcgttttattcatttttctttcggattttgaggcattaaacagataatttgctgattatgtcagattagttctcttaataattttattcattcaatctgtgttgaattcaatattgttttaactctaccaatctgcattatcctttcttgcttcatgcctcaaaacccgcttagtttacgccggagagtatatgagtacatcttgtgtagaagaaggccgaaagacctccaatgatccttatcaacggatcgcatcagagctgctcgctcaagcagacattcatatcaatggttctgaaccttatgatatccaagtgcataataaagatttttataaaagagtattacaacaaggctcattaggtctcggtgaaagctatatggatggttggtgggactgcgaacgtcttgatatattctttcataaagttttacgagcaggtcttgaaaataaattgccaagtaactggcgcgatattttaaaaatagccatggcacgcatttttaatttacaaacacaaaaaagagcgtggatggtgggtaaagagcattacgatttaggtaacgacctctttaccgcaatgttagatccttatatgcaatattcctgtggatattggaaggatgcggatagcttagaagttgctcaacagcacaaactcgaccttatttgccgtaagttagagctaaaaccaggtatgacattgcttgatattggctgtggctggggtggtcttgctgcttatgctgccaaaaactatggcgtttctgttacaggggtgaccatctcagttgaacaacagaaattagcacaagagcgctgtaaaggtcttgatgtcaatatcatcttagaagattaccgtgacttaaacgagcagttcgaccgtatcgtttctgttggtatgttcgagcatgttggcccgaaaaactatgccacttactttgatgtcgctcgtcgtaatatcaaagaagatggattatttttattacataccattggttctaatcacaataaagttaatgtcgatagttggataagtaaatatattttccctaacggttgtttgccgtctattcaaaaaaccgctgaggcaatggaaaataaatttgttatggaagattggcataattttggtgccgattatgacaaaaccttaatggcatggtatgagcgttttttagctagctggcctgaaattgaatctaactatacacctcgttttaaacgcatgtttagctactacttgaatgcttgtgcgggtgctttccgcgccagagacattcaattatggcaaattatgttaagcccgaaaggtagaataggtggattacgcacacctcgctgatttttagctatcaatagaggtaaaaatcccgttttccatagactgaaaaacgggattttttaattctagtcgtctgataacagactatattatttttcgttttcttcttcgtgtgttgcttgaagcttaaccgttaatgcttgttgcgccataacacgctctacggtatcaacaatcgcctgagtctgtggatctaactcaatattaactttatcccccaaacgcttacgacctaacgtcgttctatcgcgagtctcagggatcagatggacacagaaacgattattaaccacatcaccaatagttaaactaataccatcaatgccaataaaacctttatgcaaaatatacttcatcaatgtctgatcaaaaatacgaaaccagatctgtaagttattttctgaagtaataattttcgcaatttcagccgtagtgacaatatgaccagacatcacatgaccaccaatttcatcgccatatttggccgctcgttcaatattaacttctgaaccaaccgttaactcgcccaaattagttaagcgcagcgtctctttcactaaatcgaaactaattttattgccatcgatttttgtgacggttaggcaacaaccattgttagcgatcgaagctcctgtttctaagttattgactaactcggaaggtaattcaatgatatgggtacggaaatcacctttatcttcaatggcaataacacgtccttttccctgaacaatacctgtaaacatctcacatctccttggactgataagcgagtttatcttaattaatttagtgtaatcaggataacataagtgatattacacaaagggatcattattgccttctccccttatgatgtttgccatcaaatataacgtaaaaccacttatttacttatcaaaattctgtggttgaaaaacgtcatatctttcattgataattaaacatttatcattagaatatgtttgcttaaggattattttacgccatattaacatgtgacgttctttcctcccttccgtcttattataatgaataaaggtgtatgcgtgcagaagtatataaaagaagcgcgtagcttacttgctcttggtatccctgttatcatcgctcaattctcccaaactgctatgggagtagttgataccgtgatggcaggtgctgtcaatgccacagaaatgtctgcggttgctgtaggtacgtcgatttggttgccaacgattttattaggtcaaggtatattaatggcattgacccccatcgttgcacaattaaatggttcaggacaacgaaagcatattgctaatcgtacacagcaaggtttttggcttgccacttttttatccatcatggtcattgccattctttataacagccgttttattattgaagcgcaacatgatatcgagcctgagcttgcagaaaaagccattggatttattcatgccattatgtggggggctcctggttgtctctattatcaagtgctaagaagccaatgtgagggattatcaaaaacaaaaccaggcatgatcatcggctttattggattattaattaacattcctgttaactacgcctttatttacggtaaatttggtgccccacaattaggtgggattggttgtggtgtggcaaccgcctctgttttttgggcgatgttcttaatgatgcgctactatgtgcgtcgagcaccaacacaacgggatgttatgcccaaaaaacgcctagtgttacctgaattccacacaataaaacgtattacattgttagggttacctgtagggctagcactattttttgaagtaacactgtttgctgttgtggcattattagtttcaccattaggtgtaacggctgttgcaagtcaccagatagcccttaattttagctcattaatgtttatgttccctctttccttgggaatagctgcaacaattcgtgtgggttataaccttgggcaacgttctacagagcaagctcgtacttcagccattacagcccttgctgtcggattaatgctggcaagttgtaccgctattttctctattatttttagagaaaaaattgctttaatgtataacgataatattgaagtggtgacattagcctctcatcttatgttattcgccgcactttatcagttgtcagattccgtacaggttattggttcaggggtattacggggttataaagatactcgctctatcttttttattacctttatcgcttattgggtaattggtttgccttccggatatctcttgggacgaacggattatattgttgaagcaatggggccggcggggttctggattggttttattttaggtttaaccgcttctgcaattatgatgggaacacgtatttggtggatccagcgtcaatctgatgaggttgtcttattacgctcggagcgttaatacttccattaaagcgttattttttggcaaaggaatgacacaaatatcaacaaatagctttaaatacgagcagttgaatacaaatttgtgtttttcctcttgccagaagcaaatcatctcgctaatattcgtctccgttgtcacccagaataaagaatgcgtccatagctcagttggttagagcaccaccttgacatggtgggggtcggtggttcgagtccacttggacgcaccatttactctgaacaacatttcaatacagtgcgtccatagctcagttggttagagcaccaccttgacatggtgggggtcggtggttcgagtccacttggacgcaccatttctctttcttaattcttgttatatttcgtgttacctcccctacacaacaacaaaatgattacgcaaaatttaattgcgcaacaaaacgcttaaaaaacaagcaatcagagccctattttgatcacatcacttaaatttaccttttttcgattttcttcatggaaattaacctctataatacaaaacataattttgttgaaaggtttcagcgtattgatttacaggcatctttagaaaacagaacaaatgaatcatgatagactataatgtaagatgtctagcaatcttttatacaaaatagtgacaaaatttttatcatgttgttggagccactcacatgttgcgcaacttattagctagaaatgaatgcacttatcgtgtttcgcactgttaagatgattgatataacccaacaacattaatccttattcatccattacaatagaatcattaatagactgccatgaaaaagacaaaaattgtttgcaccatcgggccaaaaaccgaatctgaagaaaaactgactcaattactggacgcaggcatgaacgtaatgcgtctaaacttctctcacggtgactatgaagagcatggcaaccgtatcaaaaacctgcgtaatgtctgcgcaaaaacaggcaaaaaagcagccattttattagatactaaaggacctgagatccgcaccattaaattagaaggtggtaacgatgtctctttagttgcaggtcagacttttacctttacaacagatacttctgttgttggtaataaagatcgcgttgcggtcacttatgacggtttcgcaagagacttaactgtcggcaataccgtattagtcgatgacggccttatcggtatgaaagtcattaaagtcactgatactgaagtggtatgtgaagtactcaacaacggtgatttaggcgaaaataaaggcgttaacttaccaggtgtttctatcggcttaccggcattagcagaaaaagataaacaagatcttatctttggttgcgaacaaggcgttgactttgttgccgcttcttttattcgtaaacgttcagatgttgaagagatgcgtgctcacttaaaagcacacggtggcgaaaacatcatgatcatctctaaaattgaaaaccaagaaggtttaaataactttgacgaaattttagaagcctctgacggtatcatggttgcacgtggtgacttaggtgttgagatccctgttgaagaagttatctttgcacaaaaaatgatgatcgaaaaatgtaacgctgcgcgtaaagtggttatcactgcaacacagatgttagattccatgatcaaaaatccacgccctactcgtgcagaagctggtgacgttgccaatgctattttagatggtactgatgctgttatgctatccggtgaaagtgcgaaaggtaaatatccagtagaagctgtgactattatggcgactatctgtgatcgtactgatcgcatcatgaaatcacgtttagagtcttaccaattaggtgctaaattacgtgtaacagaagctgtttgtcgtggtgctgtagaaatggcggagaaattagatgctcctcttatcgttgtagcaacttatggcggtaaatcagcgcgctctatccgtaaatatttcccaacagcgcctatcttagcattaacaaataatgaagagaccgcacgccaattactgttagtaaaaggtgtaacaacacaattagttaataaaattgcttctactgatgacttctaccgtatcggtaaagatgcagcattatcaagtggcttagcccatgcaggtgatcgtgttgttatggttacaggtgcactggttgatagtggaacgacaaatacttcatcagtacacgttctgtaatactcgattatagctaatttgtaattaaaaaatttaagccatccgttttaacggatggcttttttatcgctacttttttataaaaaacatcacattgaactactgccaaagagattatttctgttgctgactatcatgatctgttttatctattggcactaaataatgcgttgaacgagcacgaggatggataaaaaagtgtcctttcggtgcattatgactcttaatgtggatcatcgatacattggctttattgcctttgcgagagcacgcataaataataaaaggtaaagcaaaaataataataaaactcaccactagcaatgaaacatacgttgtatcactactgccccccggtaaagagctaggcgggaagaatgaaacaacaaaagctaaaatagacacaatcagaccgacaacggccactaataatttaacacctttaccaccgggaatattaaatgcacgtttcttatcagattgcttgcaaaccaaatgcatatagccaataaacagcatgaagtagctacatagataaatcaccactgtcagcgctaaagcaataagaaatgacatattgcccccaccaccggtgttagtcagtaccactatagcaatagtagtaataattagctgagtgatcactaaagctaccggtacaccatttttatttactttagccagtgttggcggaagaataccttgttgtgcagccacaaacattccccgtgaaggcccaacgatccacgacgcaatttcagccaagacgccaagcaataatagtgcagcaataattttaaccgcccaaactaatccgctactaaaatggctgactaaaacactaaaggtttcaaccacccccgcagataagttgatttcgttatgagggatcactgccgcaacagataaaccgccaatagagcttaagcatattgccacaatcattaataaaaacatggcaagcggataatcacggcccggatttttcatttcgttgacgtgagtggctgaggcttcaacgcccatatagcttaaaataaaggccacaaaaaccactaaagtaccaatctgagtaaaatcagggaaaaaggttttactgctgatttctattgctaaaggcgcaccactgaccagataactaatagctaaaagcactaaaatgattgctggtaataatatccccgcgaagaaacctaatttagcaatagtagccgtgtatttagttccgccaaattgagttaaagctaatccccataaaatcactaatgcggcaatcgttttggtgagcggatcggtatttaactcaggccaatcaagaatataagataatgctcctaatacgaaataaagcattggaataaaaccaatcgctatttgtaaataaccaaaagagatcgccgcaaatccccagcgctcccctagcgtattagatacccaagcaaatacgcccccttcttgccatccttcaacggttgccatttcagctgcacataatgcaacaggaataaaccacaacaaaccgcctagtaataagaaaaagactagactaaagccggaagttgcaaaagttggatactcatagaccgccatcaccatggatgcagttatagcaaaaaaacctaataatgtgagctgttttgaggcagaacttgttgcagatgtcgccatgctcattctcctacgtgtatgcaatgaaataatggtgtgcagataatcaaggctggagaaaaagagtctatttctccaacctattaccaaataaaagagcctgtttagctgtggttaaagccaccgccgtcctcttcagataaaggtgtgctgacaggatgtttttcgaaataatcgagagtacgtttcatatcttctatcagtaatgtcgccaaatctaaactcacaccatgacgaacaagaatacgttgaataactaaatcttggcgatcagcaggcatagaataagcgggtacttgccagccacggctacgcaatttatcagcgatgtcatataaggagtagcttaccttagcctcttttttcagtttccacgctaatgcaggtattcctttttgactatcaccactgaagatcatttcaaaaggccctagcttttcaatttctcgagcaaggtattgcgcggtgtgataacaggcattgtggatcttcgcatacccttctctgccaagacgcaagaaattatagtattgagcaataatttgcccaccgggacgtgagaaattaagcgcaaaggttggcatattaccgccaaggtagttcacattaaaaataagctcttccggtaagtctttggcttcacgccatactacccaaccagagcccaatggcgctaaaccaaacttatggcctgatgagttaatggatttaacacgcggtaaacggaaatcccattctaaatcaggtgcacagaaaggcgctaaaaagccaccactcgcaccatcaacatgaataggaatatcaagtccggtctctttttgtagttggtcgagtgcatcatgtaccgcttttactggctcataagtacaggtgaaggtcacccctaatgttggcactacaccgatagtattttcatcaacacgtttaatgacctcttcaggactcatcatcaagcgatcaccttcaagcgggatctctctgagttcaacgtcaaaataacgggcaaatttatgccaacagacttgaactggcccacaaataagattaggtttatctgtcgcttttccagcagcaaggcgttttttacgccattgccattttaatgcaagtccccccagcattgccgcttcagaggagccaatggttgaacaacctagggtattgagtggatcgggtgagtgccataaatcagcaagcatatgaacacaacggttttcaatttcggccgtttgtggatattcatctttatctatcatgttcttatcgatagataaattcatcaaatcacggatctcatcatctacccaggtttgacaaaatgtggccagattttgtcttgaattgccatctagcatcagctcatcccttacagcatcaaaaacatgacgaggatggctctcttgttgcggaaaatgtgttttcggtaaggattgtgataaatcaaccgatgcataaacatcatcgagtgagctataacttggcgtttttttattcatcttgaaattacctttactaattattattacattagtgactaaatgattttaaatacctactttaaaagatagtctaataattccagtaatgaaaaattttttatattttatgaaaacaacgagagtatatttatcaaatcagctttaacactccacaagaaataacaactcattgattttaaatgatattaataatattccacttgcttttatgttaatttatttatgtacatttagaataaaatatttgtactataataaaacttgaattatgagaaataacctttatagcattaagtaataacacttaatttaaaatataaatgtaaatgaaattttaaatctaagttttaaaattaataattatttaatttagatttgatttaataaggaacaaaaaaagatgatagaaaataaccgacaccccttcgcttgcacaacacttgcgattactgacaagaaaaaacgtgtttatcatggtcggacaatggagttttcttctgatgagccaacgtctatcttagcttattatccacaaggtcatacttttcagcaaaatgcccctgatggaacccccggattaaagtacagcgttaaatatccttttatggctattaccgctcctattaacttatcgggtaccaaagatgtacttgaaggtgtaaatagtcagggactctcttttagcttaaatatgctacctaactctaagttagatgatctcgatccccaatattacgcaagctctgttcctattgctgctattggtgagtgggcattaggacaatatgcgacggttaaagagttaaaagagattatcccccaaacccatttttggtcacaaaagctattattgttacgtaacttaccaagccctttccattacgcattttatgataaaaccggtgattgtattgttgtcgaagtctctgatggtaaattacatatttatgataatcctacctattgcatgaccaatggccctattttcccgtggcatttaactaatttaaacaactacactcatctttctaatatcaacgtttccagtagcacattaggtcgtattaaaatcaaccaacctgatagtggtattgcattagcaacattacctagctcagatacttctgtagatagatttattcgtgcagtttattattcaacctattaccacaaagtttctgatcctgataaacagcttattgagcttgcccatatcatgaatcgcttcgatcgccctaaagatgcaaccattgatccactattaggtaatgatacgctaactaaacttcatactagtgaattttctgtctggacggcgctaactgatttagaacgggggatctttttcttcagaggctacaacaacttaaactttcaaaagttcacacttgagtcatttaaaaatgaaagtagcgcggtttttattaaggtcaatttggaagaggcattgtaaaatgctttagatagaaactaaaatagtttagcacggagaaaatttttttatatcagacttttacgaataaaaatcttttgtgaaataacacgcattttttatactggttatttgcttgttgtaggttatttttcatattgtcatataaagagtaagtagttatagctagttataaataaattctgtattttcttataactgtgccatacttactagtggcttcatacaaaatgctacttgttcctttaaacaaactaataatagaggttgtcacaatgaaagcaaaaattgtactaggtgcggtaattctggcttcaggcctattagcaggttgttcttctagcaacaacgcacaattagaccaaatctcttctgatgtaaaccgtttaaatacgcaagttcaacaactaagtagtgatgttcaatcagctaacgctcaagcaaaagccgcttatgatgaagcagctcgtgctaatcagcgtctagataaccaagtaactacttataaaaaataatttgactgcttaataagctgaaaacgttaagtcagctttaattaataataaaaagcagatacctatgaagtatctgctttttttcatcattgaatatctatcatcaatatgcggttacatcgaccggtatacctgaacgacgaatagtttctgcatccacttttgctttatccactttgccactttcataccaagccgtaaattgtttagtaaacgttaggggcatcgtctggggatcgtcatcttcattttgtgagagtggttggtgcacttcaataaattgcttaccatctgcagtctcagtaaatttaattggtttattgatcacttgaacccgactgcctttgggtaccacattaaacagtgtttcaatatcatcaggacgtaatctaatacagccagaactcactcttaagccaataccaaaatcggcattagtaccatgaataagatactcaccacgactgtgtgctaatcttaacgcatatgcacccattggattatctggccctgctggtaccactgccggtaacgtgatccccttagccgcataatttttacgaatattggctgtcggcgtccaagtcggatctttaatcaattgagaaacagatgtcaccatttcaggcgtttcccgccctaattggccaataccgataggatagacatcaacggttcccccttctttgggatagtaatagaggcgcaattctgccagattaatgacaatacctttacgcacggtatcaggtaagatcatctgtaagggaatttgtagtgttttgcccgcttcgggtaatagaggatcaatacctgggttggcttccatcatatttagcaaacccacttgatattgtgcagcgatcgtttctaaagaacgtttatcatcaggaacggtgtaagaaacattttccccaatgatacgtgaaccatccgtaggtagcaggtattcatgtgcataagttaagtgactgctcatccctaacagcgatgcacccaataaggttaaccatttcttcattgttgatcccgtgtgttagcaataaaataaactgactattatcatgataacattctcatcgttatgattatcatataataagtcagtttagaacattaatatgggatcgggtaacatttatgctacagtgtattccgaaaagcgtttcattaaccgtgttaccatagcgtgtaacccttgagtacgagatggcgtcaaatgactttccagtgctaatgtcgagaaatagtggttaacatcagtggcgagagcttgctctaccgttttaccttgaaaaagaataatcactaatgccactaatcctttaacaatacctgcatcgctatcaccggctaagatcagctgtttatgctcatctaattcaaccgctatccagacttggctctgacaaccttcaataaaattagccgccgttctttgttcatctgttaatggtggtaagcgttctcctagctccatcatatagagatagcgttgctcccaatcctgacaacgagaaaaattgcgtaataattttgcttcatcaggcaaagccgcaattgccatgaataacctcttttttaattgttagcctaatagtttttcaatgcgtaacaacgcattaaccagtgcatcaatatccgctttattattgtataatcccaacgaagcgcgacacatggcaggaacctgataatagtccataattggcatcgcacagtgatgacccgtacgaatagcaataccatagttatcaagaaaagttcccacatcataagcgtgatgcttacctaaattaaatgctatcacaccttgacgcgcttcattaccataaagcgttaatgattttactttggttaattgttgttgtgcatattgcattaagctattttcatatgcagcaatcttatccataccaaattgagcaagatattccaatgctgcccctaagccaatgataccgataatattaggcgttccagcttcaaatcgccacggcgcatccgcgtaggtaatatcaccattgatatgcacatgttttatcatagcgccccccccttcccatggaggtaattcatcaagtagcgcttttttgccatatagcaaaccaatccctgtcggaccataaagtttatggccactacatacaaaaaaatcacaatctaacgcactaacattgatagcttgatgcatcgcactttgtgccccatcaactaaaatatgtaactcacccccttgctgagccgaatactctctagcttggcaaataatttcagcaataggattgacggttcccagtacattagactgatgagtgatcgccagtaacttagttctgttatcaattaattggggtaattgcgctaaatcgagttgcccattagcaagcagaggaataacacggacatgaaaaccatactgttttgctaacatataccacggcactatattcgcgtggtgttccatttcagtaatgataatgttatcaccatcatttaggaaacgatggctataactgtaagcgactaaattgatcccttctgtcgttccttttacaaaaacgatttcttcttcgctctttgcacctaagaaatgtgctgcttgcttacgaacattctccactaaggtggtggcgtttgcacttaatgtgtgaatgccgcggtgaaccgcggcatattgtgttaaggcaaactgtttttcacgctccatgacacaagcgggtttttgcgcacttgcggcactgtcgagatagactaaaggtttttctttcacttgctgggaaagaataggaaagtcatcccgcgctttttcaatggaatgtgtcatcatgcctttttatacctctgataagcgttgatttattctctctagaacatgagttttgatcacactattttctaatgattctgttaattcggcagcaaatgcatgaatgatcattttgcgagcttcacttaacgcaatacctcgtgaacgtagataaaatagttgctcatcatcaatacgcccaaccgttgcaccatgactacatttcacatcatcagcatagatctcaagttgtggcttagtatcaatttgtgctttatcacctaataacaagttgttattggtcatttgaccatctgttttcagcgcttgaggggtgactgtgatcatgccattaaatacggctttccctgcatccattgcaatacttttatgtaattgacggcttaggcaatttttctcaccatgcacgagccaagtacgagtatcggcaatttcgttcgctttgggtaataccacactattcattgatagctcactgttctcacccgtcagtgcagcgctagtatgatgacgactcagtttattccccaacaagaatgcataactattaacacgagcatctcgtccaatgcttaaatcgttatgggcaaaatgttggctaatgccattttcaaaaccaagtttaatatggttgaacgaggcattatcaccaatagtggcggttaatctcgccccggtaaaatgacggttttcaccatcactactaatatagtgttcaatcacttgcatctgagcattagcgccaacatcaagatggaaacgatagttagcactgttaacttcttgccctgcatgaccttgtgtaatattaaggatataaagcggtttatctgccactacgccttttttcaaggtaatgaatagcggctgttgcgctaaactttcaactaaatgcaagaacacttcaccattaatggcttgcggtaattcactttggttatccagtaatgtcacttggtatggaccaaaatcttgactactttcagccggtgaaaatgcaccattaaccatcacgatacggtagcaatcaaatgagagcgcccgttgctcaattaaatcttgtacctcaaaaggtggcaacatttgatattgctgactgagcgtctcatctaatggcgtataatgccaatcttcgtgtcgataagctggaaaacccactttttccacttgtagccagtgattacgtgcatttaaattatcttcccctttacgctgttgatatagcgcagagaattgttttaatgcctgttgattacgctgttctacttgatgctgtttttcacgtttctcattgagggtcaataagccagccataaccttgttcctccaatttttgtgctaatgaaaaatcacctgatttaatgatttttccttggtaaagcacatgcacataatcaggtttaatataatcaaggatacgttgatagtgagtcaccacgataaaggcgcgtttaccatcacgtaagctattgacaccattagcgacaatttttaacgcatcgatatcaagtcctgagtcggtttcatctaagatacacagttcaggttcaagggcagccatttgcaaaatatcgttacgttttttctcaccaccagaaaaacctacgttaacagaacgagttaacaaatcttgaggcatatccaatagtttgattttatcttcaataaaatcttcaaaatcaaagcgatctaacggctcttggcctcgatattctcttaccgcattgactgaggattgtaagaaaaactggttactgacaccggggatctctactgggtattgaaatgccataaagataccttcacccgctcgctcttcaggctctaattccagtagatctttgtttttaaaagtcacactaccttcatcaacttcatactcttcgcgacctgctaaggttgcggataatgtacttttacctgaaccgtttggccccatgatagcgtgcacttcgccggcacgtacttgcaaatctaatcctttaagaatttcattgccttcaacactgacatgtaaatttttaatatctaacataatatatgccttcggtatttttatacccagaatttggttaatggttaaccaacgctatgttctaagctgattgctaataatttttgtgcttctacagcaaattccagcggtaattctgagaacacgtccttacaaaatccattgacaatcattgagattgcatcgtcttcacttaatccacgttgacggcagtaaaataactgatcttcaccaatacgtgacgttgtcgcttcatgctctaattgtgctgagttattcatgacttcaacataagggaaggtgtgagcaccacactctgtgccaattaacattgagtcacattgtgtgtagttacgtgcattctgcgcaccaggtaacactttcaccaaaccgcgataactattttgacttttacccgcagaaatacccttagaaataatagttgatttggtatttttaccgatgtggatcatcttggttcccgtgtcagcttgttggttaccattggtcagtgccactgagaaaaattcagccgttgaattatctccttttaagataacacttgggtatttccaagtgatcgctgaacctgtttcagattgagtccacgacattttagcgttctcaccttcacaaagggcacgcttagtgacgaagttaagaattccgccttcgctatcaccgccagagaaccagttttgtaccgtggaatatttcacttcggcatctttatgaatgataacttcaacaacggcagcatgcagctgatagctatcacgtacaggtgctgaacacccttcgatgtaactgacgtaacttccttcatccgcaattaaaatcgtacgttcaaattggcctgtttgtgccgcattaatacgaaaataggtggataattccatagggcagcgaacacctttaggaatataaacaaaggtaccatcagaagcgaccgccgcattaagtgccgcaaaatagttatcgtggctagaaacaactgtacctaaatattggcgtactaattcgggatattcttgaatcgcttcaccgaaggagcagaaaataacaccatgtttagctagctcttcacgataagtggtagaaaccgatactgagtcaaaaatagcatctacagccactgactgcccttctcttactggcacgcctaactgattaaatgcgtcttcaacttctttagttaaataatcttgggtttcttgtgttgagacagcttcattgttaccactagcacaactgccattggcacaacaagcaccgcaagatggcgctgaataataactataatcttgataattcagcgatggataatctgcttttagccaatgaggctcttccatctctagccaatgacgataagcatcaagacgaaactctagcatccactctggctcatttcttttagctgaaatagctcgcacaaccgcttcattcaaccctttatctaacgtatcggttgagatatcggtatagaacccttctttatagtgatgatcactgagccagccttgaacttcatcaccaatttcaacattgctctgagacataatctgacttcactatgttataccccaaagctctcaccacatccgcagacgttctgagctttaggattattaaatttaaacatctgattaagtccttcacggacataatcaacaactaaaccatcaatgaatggcatggcttttaatgcaacgaataacttggcaccattatgttcatagacaagatcgtcctctgaggggcctgcagcaagctcaataacataaccatagcccgtacaacctgatggcttaatacttaaggaaagtccctgactttcagggtttttctccactaattggcaaatatgtttcgctgcactatcagtcagcacaatgccttgccaagcagtatcatttagagaaaaagtttcaacattgtttgtcattactgacctcatttcgaaaggagattaatatctttcctgactctaatggtaatgataacccttatcacttcaaccctgtcttttgaaaggatattataaaatcgtttaaaaattgctctttttttgctttttaattgttaaatatagcgcttaataaattgaaatgtaacaatttttatcttttttcattacaaaaataaaacttttttaaattcctttatttcgcacaatacgcataaaagttgcaaagcaaatacattttatacctttgtcactgaaatgtagagaaaaagcataaaaaatcaacaattgataatcgcaaaatattttctttttatgcttatactgataggtaagatagcaccacttttgtgataacttcttattgtattgtgtgcttttatgacttattgattgatactaattgaattcacatacctattagtacaatcaataacttcttgattattattacttttattttcagcaataaattgtaattgccatacacgatttgtgttagtatccgcaattaataccccttcatagctcactttttgattagacaactttccttcaaagaaaatttgtcgagctggcatttctgacactgtgaaaggctttattgttgttgaagtttctttcataccatcaatagtggaaatattatcaacgataccctgtgctcctgaatcaatatcataactcatcatatcgtcaagtttaaaataaactaaacgaacttctgataactggcatactggtttggcttgataaactaacatctgtgatgtgacatcttggacatgatcaggtaataattgaaaatagtgttctgtatcatctctatttaatgagaatgaagttggatacgcgatattaaaccccgacatagtacgtacaggataatttattatctcttcactcttattgtgagttgattcgttatcacatgctgtaagtaataaactaccgattaaaataaaaacgcttttataatttagaatggttgatgtcattttttcttactattaataataatgaagataataattatcattaaaatttaaacttaaataaagataattttttcacatgacctcatttcaataaataaaaaacgcctaaagtgaaataataaccttaggcgtctattattaattaacgaattaaacaataaccgcagttgttaaacgtgaaatacaaactttacggtcagcgtcatcaaaaatttctattgaccatacttgatgtgtacgacctaaatgaataggtttacagacaccttttacaaccccttcttttactgctcgcatatggttggcattgatttctaaacccaccactttttgttcaccttttgtgcataaatagccagcaattgaccctaaggtttcagctaataccacagaggccccaccatgtaataaaccaaaaggctgtttagtacgctgatctactggcatggtgccttcaagatagtcctcacccagtgcggtgagttctataccaaggtgccccaccatattatttgggctaatatgattaagttgtcctaatgttgtttttcgtttccatatcattgcataatctccaaaagcgcctgtaatggatgttttaactcaatattatcaatacgttttacttggctacgacaagaatatccggtactcaagcaacgtgctgtagggagtgttttcaatgcatttccccatgacagttgataaattcccaatgaatttttatagttattcacttcatgcccataagtgcccgccataccacagcaccccgtagttaccacttcaagtggttgaccataacgttggaatatcgcttgccactgttgcatactttgcggtaatgccgttgactcagtacaatgactaaaaagataccatttttcagcatcttcgcagatctcaattggctcactgactaactgatttagccactcatgaaccagttgaaccttaaagttaccgcgtttatcccctaatatctcccgatattcatcgcggtagcaaagaactaaagcggggtcgactcctaccattggaatggacaactgtgcaactcgattaagcatcgttgctgttttttgtgcagttttactaaattgctgtaaaaagcccttaatatgctgtgcttttccgttaggtgaaaaaggcaatagcacaggtttaaaaccaattttttcaatcaacttaataaagtcagcaactactttagcatcgtaataactggtaaatggatcttgtaccacgataacataatggcttcgttgcttttctgataactgctctaactcttccaaggtcatcgttaacgcgctatgtccagctaactgctgctttaatgtcggagatgacaatagaggcagatctaccataccaatagtacgtttactcaacgattgcaccaatggttgcttaataaagaaattaaacagacttggtacttttgccattaacggtgtggtgagttcgacatttgccacaatatgatcttttagcggacgtagatagcgttgatgatataactgagtaaatttggctctaaatgatggcacgtcaattttaatcgggcattgtgtagagcacgctttacaggctaaacaaccattcattgctattttaacctcatgagagaaatcatattctccacgtttagctttccatgtattgcgtgttttttcaatcagtccccgtaagctaggtttgttatttgtaagacttgtttctaactgctgagggcttactccttgctctgtaagtagacgtaaccactctctgactaatgtcgctctgcctttaggtgaatgaatacgttgtccagttattttcatagaaggacacattggacttttaacatcaaagttaaaacataatccattaccattacactctaatgcaccgcgaaaatcttcgcgaaccgatacaggaatggtgcgatcaaatgtgccgcgtttaatagcatcgacctgtttcattggcgcctcaacctcgagaggaggacatattttccctgggttaagtctatttcgaggatcgaacaccgtttttatttgacgtaattcgtgataaagggtttcgccaaagaattctggactatattgcgctctaaagccttttccatgctccccccatagtaagccaccatatttcgccgttaatgcaacaatttcatcagaaatggttttcatgagttgttcttgttgcggatcacacatatctaaagcaggtctcacatgcaatacgccagcatcaacatgaccaaacataccgtaattgagctgataactatcaagtaatgccctaaattcagtaatataatccgctaaatgctctggtggcacacaagtatcttcaacaaaaggaatgggtttagcatgccctttagcattacctaatagccctactgcttttttacgcatggcataaatacggttaatatcggcgagattatcacatacctgataaccgataacgcccccttcgccattcttcatcagcttatctaagcgctgacataaatcctccacttgtgaggcaatcagtgttttatcatcaccggcaaactcaacaatatttagcccttgcatatctttatcgggcacatccgtaatcaatgcattaacggaatgccagacaatatcttctcgagcaaggtttaatactttggagtcaacagtttcaacagaaagcgcctttgcttttactaaaaacggcgcgttacgcaatgcggaatcaaatgagtcatacttcacattcactaaactgcgctgctttggaatgggggtaatatcgagtgttgcctcggtaataaaggccaaagtcccttctgagccggttagaatacgcgtaagatcaaaatgcttcatatcatcgctaaacacatggcgtaaatcatagcccgttaaaaagcgattcaatttaggaaatttttcgagaataagctgacgttgtgctttgcaacgggataataccgtttgatatatccgaccaacagcagaatcttctttcgcaatagtttcagctaaagcgctgtccatcgcgcgagtttcaagcaattctccgcctagtaaaacggctctgacgcctaatacatgatcggaggttttgccatataccatagagccttgccctgaagcatcggtattgatcattccccctaatgtcgcacgattactggtagacagttctggcgcaaaaaagaaaccatagggttttaaaaacagattaagttcatcttttatcacaccggcttctacctttacccatcgctgttctgggtttatctcaataatacgtttcatataacgagataaatccaccacgataccctcggttaacgcttgaccattagtgccggttccgccacctcttggtgtcaaagagagggaatgaaaacgaggttcatccactaaacgtgctacaatagtcacatccgctgtagaacgaggaaaaataaccgcctgtggtagcaactgataaatactgttatctgttgccatagtgagtctatcggcataagtgctcgatatatcacctgtaaaaccattttgtcggagtgtatttaaaaattcggttgtgagttcactgacttgcggtgcttgcgatatacgtgggatcatttgttatagctctttaatctaatttatccacattgctttattaaaactatctcaatgtatgccaagaggtgcaataatttgaatttgcactttcagaccgatacctgttcaccttatcatacaattctggcaaattgcgtagtgacataaacaacatgatatttgccatgtttattcatctgcttttagcattttattcgtgtagggatttaaaatcatggaaaaaccgcagatccatacagatatacccaaaattttattcaccgttctttttatttctttttttattatcggtagtttttggatcctgaatccttttatcgttggttttatttgggctggcatgatagtggttgccacttggcctttactcattattttagaaaaacgagtaaaatatcgctggctatcaaccatgatcatgatgattttaatattactgattttcgtcattccgattattttgttaattagtagtgttattgacaacagtgctccattgattgaactagcaaaatcaccttcagatattcaaccaccacaactactatggttaaaagagatccccatggttggtaatacgctctatgaaacttggcactctattctcgtttctggtggtaatgccttaatggcgaagatccaaccctatattggacaagcagcaaattggttctttgcacaagccttaaatattggccgttttgcgcttcacttagttgtcatgttacttttttcaggattactctttttacaaggtgaaaatgttgttgcttggttacgtcattttgctgtgcgtcttgccggacaacggggtgatgcagccattttattagcctccatgtcaattcgcgcagtggcgctgggtgtggtgttaactgcgctgatccaagccgttattggtggtattggcttaggtatttcgggtgtgccttatgccacagtattaacggtattgatgtttatttgctgccttgcgcaattaggacctttgttcgttctggttccttctattctatggctattttggaccggtgatactacatggggtatcgtcatgatcatttggggtgggattgtggcgacgatggatggtgtactacgtccattcctcatcaaaatgggagctgacctacctatggtactgattttgaccggtgttatcggtggtattttaacactcggtatgattggtctgtttattggccctgttgtattagccgtagcacacagtttattgaatgcgtggatcaatgaagttcctaaacccgatccagatttaacagaaactgtagaatttatgaataaaaactttatagaaaaagagtaaataatataaaagcatgtaagtatcaacacttacatgctttataagtattacttaaaactttaataaagattatcaatttatgagtattttattatttttatatcttgaaatttacaatttgaaacaattcttatttttttaaacctgtttgctaccagcgagttatattcacttcttaatatcctaatatttttttgattgagataattcttagagaataattaactcatttctcttaatataaatctcatcgaaacgaatgtttcatttaattaatggttttgcctattttattaatagattaaaaggcgagaccaaagtatataaaatattgctgtgtgtagtctttgcctgtcagcccatgataggctttttttttatctattatttataaatagtataaaaaaagctcacattattttgtgagcttttaattattcaataataatataattattgttgtgctaatttcacccaggttttaataacggtatctgggtttaaagataagctatcaataccctcttccattaaccattgtgcaaaatcttcatggtcagaagggccctgtccgcagatcccgacatatttaccttgacgtttcgctgattgaattgccatagataatagcgcttttaccgcatcattacgttcatcaaacagtgatgagacgacaccagaatcacgatctaagcccaatgttaactgagtcatatcattagagccgatagagaaaccatcaaaatgagccaagaattgatcggctaataaagcattggatggaatttcacacatcataatcacttttaagccattctcaccacgttttaaaccattacgtgctaactcatctatcacttcttctgcttggcgcaccgtacgtacaaatgggatcatcacttccacgttagttaatcccatctcattacgcacacgtttcactgcttcacactcgagtgcaaaacaacgacggaaatcatccgatacgtaacgacccgcaccacggaaacctaacatagggttttcttcatcaggctcatagcgatcgccaccgactaagtttgcatactcatttgatttaaaatcagacaagcgaacaatgacacgttttggccagaatgctgcagcgagtgttgcgataccttcggttaatttaccaatataatattcaacaggtgatgcataacccgccatcatttcatcaatttcagcttttagtgcatctgtttgatcttcgtattcgagtaaagcgcgaggatgcacaccaatcatacggttgataataaactctaaacgcgcaaggcctaccccatcatttggtaacccagcaaagtcaaaggcgcgatcaggattaccgacgttcatcatgatttttaagccaagttctggcatgttatcgattgcggagctttgaatagaaaaatcgagtttcccatcataaacaaatccggtatccccttcagcacaagagacggtgaccacttgcccttcgctaatacactccgtcgcatcgccacaacctaccactgctggaatacctaattcacgagcaataattgccgcatgacatgttcttccaccacgattagtcacaatcgcagaggcttttttcatgataggctcccaatcaggatctgtcatatcggtgaccaacacatcacccgcctctattctatccatctcacttaagttatggataaccttaaccgtaccactaccaatacgatgaccaattgcacgaccttctacaatcacagtgcctgtttcatttaactgatagcgttccataacttgttggttagaacgaactgtttctggacgcgcttgaacaatatatagacgaccattatgaccatctttagcccactcgatatccattggacgtccataatgttgttcaatcaataccgcttgttttgctagctcttgcacttcatcatcagttaaagagaaacgattgcgcaatgcttctggcgtatcttcaatacggacttgtttaccatgctcaatgctatcggcataaaccatttggatctttttagaccctaggttacggcgcacaattgccggtaaacctttcgccaaagttggtttatgaacatagaattcatctgggttaactgccccctgaaccaccatttcccctaaaccataagcagaggtaataaagactacttgatcaaagcctgattcagtatcaatagtaaacatcacccctgatgaagctaaatcagagcgaaccatacgttggacacctgcagataaagcaacaccgcggtgatcgtagccttggtgaacacgataagaaattgcgcgatcattaaacagtgaagcaaacacgtgtttaatcgcaactaaaattgcatcgataccttgaacgtttaaaaatgtctcttgttggccggcaaaagaagcatcaggcatatcttcagcggttgctgatgatcgtactgcaaatgaggcttcagattcaccttcacttaaggtctgataagcatcacgaatatctttctcaaactgaggggtaaaaggtgtatcaatcacccattggcgaatttggttacccgcttgtgctaattgattaacatcatcaacatcaatactatcgagcagctcataaatacgctgattaataccactttgttccagaaaatcattaaacgcttgcgctgtggtggcaaatccattaggaacagacacacccagttccgcaagattagtgatcatttcaccgagggaagcatttttcccaccaacacgatcaacgtcattcatacccaattggttataccaaagtacattgcacggggtgaggctattgctggacattgagaacaatccttttttaaacaaatgagagagagaaaaaaaagaaaaacccgctgtcaaaacgacaacataaataagcgtatcacaatgttatggagaatatagaaaggtgaatcgatcaaccagaaaactttatttttttatcctttataatcactaaaaatactatagataatattgtctgaattgctaattcagctaaaaaaaaggtgagaggaatgatattaagtttgaattcaattaactgtgataataataaacttgttgatagaactgttttttttatctctgacggcaccgctattaccgcagaagtcttaggccatgcggtactctcacaattcccattaaaaatgaaaagctataccttaccttttgtatcttctgtagaaagagcggaagaaataaaaaataagattaatgaaatttataaaaaaagtggcgccaagcctctggttttctactctattattagtcctgacgtaaaacgaataataaatagtagtgaaggattctgtcaggatattgtgcagtcattagttctccccttagaaaaagaaattggcgttcaagcgctacctcaattaaataaaacgcacggtttaacagaaaaaaatctcagcaaatatgatgctcgaattgctgctattgaatacactttatctcatgatgatgggatctctttacgcaatctcgaccaagcgcaagtgatcttaatcggtgtctcacgctgcggtaaaacccctaccagtttatatttagcgatgcaatttggcattcaagcggctaattacccttttactgctgatgatatggattttttaaaattgcctcctgaattaaaagagtatcaacataaattgtttggcttaaccattgccccagaacgccttgctgctatccgtagcgaacgtcgtgaaaacagtcgttatgcatctattcgtcaatgtcgtattgaattagcggaagttgaagcgctatttaggaaaaataacattccttacctaaatacgacaaactactctgttgaagaaatttccactaaggtaattgattctatgggattagccagaagaatgttctagagacagtaagttattttttatttatttttcaccaataacagtgttgaaattagctgaatttcgtttattgtgatcttaatcactgggtagacttaccctgtatttttattgagataaattatgttaaaaacagacgaattacggacaaaggctttagccagcctagtaacgccggaaacgttagctaatgagttacccatctcacaagagattatcagtaatatcacttctgcccgtcaacgcattgaagctattctcactggtgaagataaacgactattagttattattggcccttgctctatacatgatcccaaggcggctaaagagtacgcaacaaaactaaatcaacaaaaagcgcgttttcatgaccgtctagaaatcgtgatgagaacctattttgaaaaaccgcgtaccgttattggttggaaaggccttatttctgatcctttccttgataactcttgtaatgttaatgaaggcattcgtattgcaaggaaactgctaattgagatcaacgcattaggactccccacagccactgaatttcttgatatggtcacggggcaatatattgcagatttaatcagctggggagcaatcggggcaagaacaacagagagtcaagttcaccgtgaaatggcctccgccctctcttgccctgtgggatttaaaaatggcactgacggtaatatacgcattgcgatagatgccattcgtgccgctcgtgccagtcacacctttttatcacctgataaaacgggacgtatgacaatttaccaaaccagtggaaatccctacggtcatattattatgcgtggtggtaaaaagcctaattatcatgccagtgatgtagcagatgctgttgatgcactgaaacaacttgatttacctgaacacttggtcatcgattttagccatggtaattgtgaaaaaattcatcgtcgccaacttgaagttgcacgcaatgtcgctcaacaaattacggatggttcacaagctattgtcggtgttatggcagaaagctttttacaagagggatcacagaaagtcacagcagataaggtgctgacctatggacaatctatcactgatccttgtctcagttgggaagataccgaacaattactggaattattagctcaagcggttgaaagtcgatttaaataatatcgccaaaaaggagagttttacctctcctttttaacttacacaaaaagtcgttatccatcttcattaagattaagctttatcttctcccacgctaatcaactgtatgatttttattctaacaccctatttttgttgttcttttgttactaatcatcttaaatttagacgtttacgttaaaaaaagcttgtctaaaatattctgataacgataatgattatcataatcataacctctatcagtattgctattgaaatgaataaaaatgttcataatttaaacgattcatcgataacacgtgaaacaagctccccagtcattcaatctataaatagcatagaattactgggtaaatcgggcgtggtttatattcaacataacggagagttgtatcagttacgccaaacaaaaacaggaaaacttatcctaacaaaataattatttaatcccttttcgcaagccacctattttgctaggcagccagctaattcactccatatacaaggacttttatggatattaatggtatgtctatgctgaaaagaaatttcaaatactccacattagctacagcaatttgtctgttatacgcgccgactacttttgctcatattgaaaaagtagagacagatacattgactgttattgggcaacaagacaatcaaataacggattttcaatctgtcgtcgatacccgttcagcacaagctcaaaccgcatctaccacgggacaattgttaaaacaaatcccggggatcaccgtatcagggacggggatcaccaatggtggcaatattatgatgcgtggttacgatcaaagaggtgtcaaaatctttgtggatggtattcatcaacctattgataatactatgaacaagcttggtggcctttttattgaaccttcacttatttcgcgcgttaaagtcaaacatggtggctcttcggttaaacatggaagtggcgcgctaggtggcgttgtttcgttctcaactctccatccaaatgagttattagacgccaataaaaaccttggtgctaaattatttagctcattctcttctgcggataaacatttttcttatggtggtgtgatcgcaggtagacatcagttagtggaagggttattggcttatagccaaagagagcgtggcccgatacgtattgctgatgactcaatattaaataaccacgaacgtatcaaaaattattttgcaaaagcctatgtttaccctacagaggaacaaaccgttattttttctgcccgtcaatataataatgcaggagagcaaagagaagttttaaatcgaatgggagggtttggaaaaagagacagtaataatatgtatcgagccaccaaacaaaatgatatctcactcacctatcatttaaatccaaataattatgattggctcgatctgagcactcaactttattattctcagtttaaaattgcgcatacgtttctgacggatacacgcaaagaaatatatccagacatagaaagtgtgctaggtaattctgaaaaacgtacccaatatacctatggtatgaaagtagaaaacgcctttaatttaaattactttcaagataggttgactcaatctgtgattatcggcattgatgctgaaaaacagaagatggtatcgaataataaggctaaaaatttccctttatcacatatggataatgcctcaggttgggttcataacacgttcaatacccctctattacccattactttaattgcgggtcttcgttacaactattatcaaaatgtccctgataacagtaaaactttagattactacaaagacttaaataaaaaaggagacatgacctccgccgacaaatatcaagaaacatatcaaaatatttctaaaaatattgcgttacgtctcacactgaccaaatggttacagatctattcttcttattctgttgcctttagggcgccgactttaagcgaaatgtataatgactcagtacatttcactataatttccccttttaataagaaaagctatgatgctcgttgggttccaaattccacattagaaccagagacgaatagaacatgggaacatggtatcaatttacaaaaaaatgcgttgatttttaccaatgaccagataaacattaaagcttcatattacagcactgaatcgattgaccacattacttatcaacagtggtatcatagtcgtaagcctatccaattaaaaaatagtcatattgcgttatctcccattaaagatgctcgtgaacctttattatttcaatcagttaacttgcctaaagcgcttattcacggctttgatttaagattgctatattctcatccatacatcgctatgggggtaaattacaatcaaactaaaaccttggaactgtcgtctctagagactatttcaatggtgcgccctgaaacattaaccgcttttataaatgtacccattatcaaaacaccattttctgttgcttggtcaggaaagtttgccggtccaacggccaaaaaaggcacacataaataccctggttcagaggaagtgactactcgattaaaagaagatcttcagcaataccctggctatggtgtgcatagttttgcagtcaactatcaatccaataataaagatatacaagcctcattggtactcgataatgcattcaacaaagtgtattactcaacggtaggtgtgcctcaagaagctagaaatatcaaaatgtctgtcagttatcgctggtaaacaataaaaagagcaatgatttttatcataacgggctgttgagtttagcagcccattttaataacggagatcgacctgtatgtctcaatcatcgcgatgcataaaggtgagtgttttagttgttgcaacagcgattagcagtgcattcgctgaaaataaaaatcaaatctatggagaaaaaaatagcggggagagaaacacacaaataataacggtttatgcaacaggtaacgagcgagatagctttacattaccaatgatgtcgaccgtcataaaaaataacagtgctttgacagaaacggctggaagtgccacggagttgttgcgtcatataccgggcatttcaatatcaggagctggccgcacaaacggtgaaactatcagtatgcgtggctacagtagtaacggtgttttgacactagtagatggcatacgccaaggtactgatacaggtcatattgacagtatttttgtcgatcctctactcattaaacaagttgaagtggttcgtggcccttcagcacttttatatggaagcggtgccctcggtggggttgtggcatatgataccgttgatgccagcgacttgcttgcaaaaaatgaacatggtggtgtgcgtgttacagcccttggtaatacggcacaacagagtcaaggatttggcattaccgcttttggtcaacaagacaatttcgatggattactcgccctctccgctcgtgataaaggtacaactcgctatggaggcggttatcgtgcgcaaaacgatgaaacaatcattaacttattatctaaaggacgttggtttattgatgatagcaatacgttaagtggccaattacgctattatcataacaacgcacaacagcctaaggatccacaactcgccaataacccaacaccggctaatgtagcgacaaatcgtactacaacacaaaaagatgcacagttaacctatcaatatcatcctagtgatatgtcatggattaacctaaaaacacaagcctattacagcgaggtagatattaatgcgaaaacacaacaaaaaggatttgaaggtagagagcaaaaaacctatggcattaaaattgaaaatcgcactcaattagccacctacccctttgctgctcacgctttaacttatggcggtgagatctataagcaaaagcaatcacccagtgcaaatgccgaaagcttccctaaagcagatattcgttttatgtcaggctggttacaagatgaaatgactttacgtgatgtacccatttcattcatcgtcggtacaaggtttgataaatatagcagtcaaaatgatcgttatgatgacatcagcgctgataaatggtcatcaaaaggagccgttagtattacacccacagattggttaatgctttatacctcttatgctcaagcttttagagcaccaacaattggcgagatgtataacgatgctaaacattttgatgccccattccccggagcaccaaccaattactggcgccctaaccctaatttaaagcccgaaaccaattcaacaactgaatacgggttcggttttcaattcgacgacttattatctaataatgataatctgaaaattaaagctgcccatttcaatacgcgtgcaaaagattatattgatacagatgtcgctatttttcagggatatacacaatcgacgaatattccaagagcaactatttggggttgggatatcgagatgaattatcaatcgaagttctttagttgggatttggcttataaccatacaaaaggaaaagataatgccagtaatgcctctattacctctattgagccagatacattaaccagtcgcctcgatattcccgtacccaatagtgatttttccgtaggttgggtgggacaatttactaaaaaaacagattttacaaaacatgatcgctttaatcgcccgaccaatcgccaacaagcgggttatggtgtcaatgatttctacctccgttatgaaggtagtgcttcattaacagggctaacaacctcactggtactgggtaatgcatttgataaaaaatactactcttctgcgggtattcctcaagaggggcgcaatgcaaaagtactggtgagttatcaatggtaattaacaataaaataaacgaaacaataggagtttccgtgactaaacctctttatgagagctacctgcaagcaaaaaatgaaaaaaaagcatcttatgcgcgtgatttagcaacttaccttaatgtaagtgaagctgagcttactcacgcgcgtgttgggcacgatgctaaacgcttacatggtgatgttcgtgatattttaaccgctctcgcaaccgtaggcgaagtgaaagccattactcgtaatgaaattgcggttcatgaacatcttggtgaatataccaatgctcgttttaacgatcatgcaggattgatcttaaaccctcgagccctcgatttacgctttttcttctctcattgggcaagtatctttgcattaaccgaagagacggctcgtggcattcgtcatagtattcaattctttgatcttcatggtgattctctccataaagtgtataccactgataatactcatatggacgcatggaataccttaatcgatacttatttatcaccagaaaatcccgtattagagattacccccgctaaatcttttactgatgcaccggtaacaacggcattagcacaacagttagaacagcaatggcgctcgatgactgacgttcatcaattctttaaaatcctgcaagaaaataatctcagtcgccagcaagcgttcaaagcggtcagtgatgatttagcttatcaagtagataatagtgccttaaaaacattattagcactggcgaaagaagtacaaaatgaaattatgattttcgtgggaaatcgaggttgtgtacagatctttaccggtaaaattgatcgtttagtacctcatcaatttgaaaatagtgaacaagtatggattaacatttttaatcctgcatttacactgcatttaattgagagcgaaattgtggaaagctggatcactcgtaagccaacccaagatggttttgtcacaagtcttgaactatttgatagcaaaggtcaacagattgctcagctctatggacaacgcactgagggaacaaaagaacaacaacaatggcgtgagcaactcaacgctcttgctaaaatagcttaatagaaggatagctcaatgaaaaaatggcttcttttgatcctgtgtagtttgatgacattcaccagcctcgctaaacaacgtattgtcactattggtggtgatattactgaaattgtttttgcattaggtgcaggcgatcaggtcattgctagagatagtacgagtttagtaccagagcaagttaaatcattacccgatgtgggttatatgcgcatgctcaatcctgaaggtattctttcggttaaaccgacgctgattattgctagcgaattagctcgcccttcttttgcattacgtcgtatcgaaaaagcaggtgtacctgttgaaactattacgggtacacgttcattagaagccattaatgaaaaaatcgatgccattgcaaccctcttacaaaaagaaacagagagtcagcaattaaaagaaaagctcactcaatctattaatcaaattgccacgacgcctattgataaaaaaattatttatatcatgagccatggtggtgttgcccctatggctgccggtcaaaatactgctgcagatacgattatcacactggtaggcggaaaaaatgctatgcaaggttttagtagttaccgcttactgtcacaagaaggggttattgccagccagcctgatattttgttggtcactaaagagggaataaaaggtattggaggtatcgaaaaactgtgggacttgcccggcataaagtacacccccgcaggtaaaaataagcgctatatcgttgttgatgatatgggtttattaggctttaccttatcaacccccaaagttatgcaacaaattcgtcaagcattggagcaataatgtctcgttttcgctcaccgtggatgagtattgccattttactcatcttatttaccatcattacgcttatttctgttaatagcggcccgctagcactctcatttagtactttatgggatcgctcttttgatgatatagagtggcaaatttggcttgatattcgtttacctcgagtactattagctattctcgtcggtggcgctttagccatatcaggcaccatcatgcaaggactatttagaaactcacttgccgatcctggattactaggtattagcagtggtgctgcgctaatggtcgctattgtgattattttacccttctcttttttatccgtattttctttctacagtcatattattgccgcctttattggcggcttaatagtggcaatgattattttttcattgcatcaattaagtgatggtaacttggcaagattgctcctagcgggaattgccattaatgcgctttgtatgtcttttattggtgtattgagctatatcagcacagatcagcaactgcgccaattttcactatggatgatgggctctttaagtaaaatagactggaacaccttggcgattgcaactctcgtgattattcccattagtgcattagcctgttggcaaggtcataaacttaacctattacaactcggtgatgaagaagcacattatttagggttaaatgtaagaaaaacaaaatttattttactactactcagtgccattttaatcggttgtgccgttgcattaagtggtgttattgggtttgttggtcttgtggtgccccaccttattcgtatgcgattaggcagtaaccatatttggttattaccggccaccctattagggggagcaatactcttattagccgcagataccctgtcaagaaccttggtatcccctgcggaaattcctgtaggacttattaccggacttcttggtggaccttattttctttggcttattttacgacaaccagcaggacgcatgtcatgatggaaaatcaacacactccattattatatggcaataacttgagctataaaatcggcaataaaactattcttgaggatgtttctattgcacttaataccggtgagcttgtcacaatcattggtccgaatggtgctgggaaatcatcattattacgtttattgaccggctatactcccccgacacaaggagaatgtttttttaaagggaaaacttactcacagtggaatagtcaattattagcgcaaaaccgtgctgttatgcgacaaaacagccagctatcattctctttttctgtagaagaagtcgtcgctatgggaagagcgccacatgggcaaaaacataaacaaatcgcaatagaaaccgcgctattacaaaccaattgtttaaagcttaaaacaagagattaccgtcaattatcaggtggagagcaacaaagagtgcaacttgctagagtgcttgctcaactttggcaaccgacacctgagaatgttgcgctatttcttgatgaacccacatcggcacttgacctctaccaccagcaacaaagtttgcgtttattaaagcaactggtcaaaacgcaaaatttgatggtgtgttgtgttctgcacgatctcaacctcgcctccctttatgctgatcgtattttattactgcatcagggaaaattagtttgcgaaggtacacctcaagatgtactcaccgctgagaatattgaaaaatggtatggcgccgaggtcagtgttaatactcatcctgagttatctcaacctcaagtttttttacgcccataaataataaaagagaaaggactgagtcctgttgaatgcagagctcagtccttaaaagacgcttaataacataatttctattggatgattattaccttcaccaaatagagtattactgcaatggtaaagcaaaactcacttttaccgtctccatgggtacttctgtttttatgctttgaatgctaggaatttgtgttaaataatcagcgtgaaaacggcgataagtggcgagatcttttgtcacaatgcgaataagtgcatcacattctcccgccattagatggcattcaaccacttcgggtaatacttttatcgcctttacaaattcttcaatagtttcagcatcttgtgctctgaaccaaattcgcgcaaataaagataatcctgcatcaactttactaccatctaatacggcaacataacgcgtgatcacacctgactcttcaagtaaacgtacacgacgtaaacaaggagatggtgagagtcccacttcttttgccagttcgatgttttgaattttgccatcgcgctgtaacacttgcaaaatatgcttgtctatcttatccaattttattgacatcaaagattaaccttagttctatttgtggaattttattgccaattaattatttttgttagcaacaaagcaacccgatttttacgaaaatatcatataatttttcagctaaattgcacagcaaaaacgatattttcttcaattgctcaatcaggtgaaaaagatggaatttaacactttgttattctttgcccttacagtactgcctttaatttgcacacctggccccgatattctttttatctcctcacaaggattagcgggaggaataaaatcagcgtggtttgccaatatcggtgtcatttcaggttatatcacacatgctattcttagtgctttgggtcttgcaacgataatggcaacctatcccattttcttttatctactaaagtggctaggtgtgatttatattacctacttagcaatcaaaatgctgatatctgcctgccaaaaaggccaactcacactacatgcagataaaaaaacacatctctttcgcaagggctttttaacgagttttcttaatccgaaaggcttactcgtctatctggctattttaccaaattttatcaataaccagaatgatatcgctatgcaatctctgcttttatctgggatatttatcactatttgtctatttatctatggctttttaggtacgattttcgcttatattggtttaaaaggcggattaagtgataaaggacgccgttataatgatggcattgccggcagtttacttacctttgcagccgttaatttagcccttaattagagggctagcatcactttatagtgatatttgctcaatgccgtgcaatatgaccatttaactgatgaatacgtacgctaatgttctatttacgacgtaattttcgacacccttcaccaataatttgcattcctttttcagtctgaccattccattgaaaagaagagtttaaacgaaaagcatgattaaactgtgaactggtcgaaaacatagcacctggtgcaatactcacccctctttcgagagcaaaatggtacaatgaattagcatcaaagcttggctcgaattctaaccataggaaatagcctccgacaggaatattcactttaacatctttaggtaaatgcgtttgtatggcctgtaacatacgataacgtctctgctctaataataatcttaagcgacgtaggtgcccgtcataccccccttgtgataaatagtcagcgatagcttgttgtgttggcatactcgctgatacagtactcatcatttgtaactgctgtattttagtcgcatgttttccggctgcgacccacccgactcgaaatcctggcgctaaacatttagaaaaagaagcgcagtgcaatacgctattggatttatcaaagcctttcacaggcattggcgcttttggactattatacagttcaccatagacatcatcttcaattaaggttatctgttttgccgctaaaatttctactagtctgattttattttcatcaggcatagtgccacctaatggattttggcaatgactcatcaaccaacacgctttaatgtcgtattgttctaccaccttctctaactcatctaaacaaatgcctgtcaccggatcggttttgatggcaatcgcttttaatcgtaaacgctctatcgcctgtaatgcgccataaaaagcaggagattctatgacaacccaatctcctggctcagtaacagcttgtaaactaaaacttaatgattccatcgcacctgcggtgatcacaatatcgtcaggcgatacatgaataccttgcagtgcatagcgttgggctatattacgacgtagtttttcattaccaggaggtaaattaatcactgaactttgaggggctaaatgtctagcggcagaggctaatgctcggcttaatttaggttgaatgaataaactgggatctggaaaggcggaaccgaacggaatgatattgggatctttacaggcttgaagaacattgaatatagaggcgcttatctcaacattttcactcatatgtagccctttgctggcagttacttgagcaaaacctgtattgcgatgtgcaacataataacctgattgcggacgagcggtgatccacccttgactttctaacagttgataagattgtaaaacggtcattaaacttaaacctgattgtttaaccgtatcccgtaatgagggtaaacgatcacctgattgccaaatattatcttcaatttgttggcgtatctgtgccgcaagctgttcatatcgagtcatatttacctattcaccctcaaactgttatagtcgtttttaaacttattgtcactattatagtttactgtcatatggtctacttatccacacgatttacctgctatttacagatcagcgcgatttgtatatcaaaataatgaggttgtttatgtttgggttaagtgcctttgatttggcgcgtatccaatttgcgtttaccgtttctttccatattatcttccccgcaattactatagggctagccagcttcttagctgtcttggaaggcttatggctaaaaactcgcaataaggattatttagcgctattccatttttggtcaaaaatattcgctgttaactttgctatgggcgtcgtctctggtctcgttatggcatatcagttcggtactaattggagctttttctccgattttgccggctctatcaccggccctttattgacttatgaagtacttacagcattcttcttagaagctggatttctaggtgtgatgttatttggctggaacaaagtaggtgaaaaattacactttttcgccacttgcatggtggcattgggtacattaatgtcaacattttggattttagcctccaacagttggatgcaaacaccacagggattcgaaatcgtcaacaatcaagtagttcccgttgattggctagcggttatttttaatccttccttcccttatcgtcttgctcatatgggcgttgctgcatttcttgcttcggcattctttattgccgcctcggcttcatggcatttattaaaaggcaacaagacctctgcaatgaagaagatgctctcgatgtctatatggattatcttaatcttagcgcctattcaagcacttattggtgatatgcatggtttaaatacgttaaaacatcaacccgccaaaattgccgcgattgaagggcattggcaaaataatcctggtgaggctacaccgttaattctatttggtataccggatatggatgaagaaaaaaccaaatatgcccttcaaattccttatttaggtagcctgatattaactcatagtttagataaacaagtaccagcactaaaagaatttcctaaagatgataggccaaattcactgattgttttttggtcatttcgtattatggtcggccttggcatgctgatgattttagtgggtgtatggggcacatggttacgttataagaaaaaattatatcaatctaacctcttcttgcgattcacttttctaatggctccttcaggattaattgccattttagcgggttggtttactacagaagtaggtcgacaaccttgggttgtgtatgggatacaacgaacacgtgatgcggtatctgctcatggtgaaatgcatatgagcattagcctactgattttctttatcgtttatggatctgtattcggaattggatatgcctatatgttaaaacttatccgcaaaggtgcgccggaggttcaagatgggaattgatttacccgttatttggttcatcatcatcgtatttagcacattaatgtatattgtgatggatggcttcgatctcggcattggcatgctctatccttttataaaagagagagaagatcgcgatttaatgatgaatactgtcgccccagtatgggatggcaatgaaacatggctagttttaggtggtgcggcgctatttggtgcgtttcctttagcgtattcagtgatccttgatgctttagccatgcctttaactatcatgctagttgcgcttattttcaggggcgttgcttttgaatttcgctttaaagccgatgacactcataaagttttttgggataacgcctttattgtcggctctctattaaccacctttatgcaaggtatagtcgtcggtagtattgttcaaggtttacccattattgaccgtacttttgcaggaagctattttgattggctatcaccctttgccctgttttgtggctttggtctagtcattgcctactcactgttagggtgtggctggctcattatgaaaactcaaggccatttacaacagagtttgtataaagtgatcttgccattaacgttcgttatgctagcagtgatagccatagtcagtttatggacaccattagcacaaccggcgattgctgaacgttggttttcactacccaatattttctttttcttacctgtaccactgctagtgttatatagcgcttggttgattattcgcgcagtaaagaaaaaaggtcattacttacctttctttgcttctctagcgattatatttcttggttttactgggctagggattagtatctggccaaatattataccgccggcaattagttttatcgatgcatcagcaccaccggaaagccaaggttttatgctcgttggtgcgctatttatcattcccattattctcgtttatacattctggagttattacgtattcagaggaaaaaccaattatgaagaaggctatcactgatccgaaccctgaaacaaaaccctcattactgaaaaaatggggttggttaattaccatttggttttgtagtgttttagcgctatttgccgtttcttcgctatttcgttttttaatgacggcagcgggaatgaaagtaaagtaaaaaatcaatcaggtaatataaaaataaagcgggataaattcccgctttattttagttaaaaaaattcctctttttaactcgcgttactgttagtgactctcccctcataaaaatacaagcgctttaatttgttgatttttattttctttatttacatcttatttgaactacatcacgcttcgacaagtcaatcttattcatggctttactaaattagtgttaatagtgataatgactatcattattgattgtaaatgataatatataacaagtaataaatagcttagatgggttggataaacgtgagtaatcaagacagcacgcaacaaaagaatatttatcgtcctgcaccacctcgtttggtgcaagtaaaacgtatagtagatatcacgccgggcatgcgctctattacctttactagcgatgacttggacaattatccaagtcacacagggggtgcccatttaaaaatatttttacctgtagaaggccaaactaaaccaacaattccaacactcactgacaaaggccctagttggcccgaaaaccaaccaagagcgatagtacgaacttacagtgtgcgagctattcgtcctgaattaaaagagcttgatattgaatttgcggttcatgaagatgcagggccggccattaattttgctttaaatgccaaggtaggtgattatattggcattactaatcctggaggccctgatcccctattggctcccgcctctcattactatatggcagccgatcccagctcattacccgctttaatggcattaattgaaacaatgtcacccgatgtacagggtaaagcggtgatccgcatagaaaatgaatccgatcgccaaatcattgatgctcctcaggggctagaaattgtttggctagtcggctctgttgaaacacaaactcaacctctgattgatgaatttatctcttggtcgttaccaaaggaagatgtggcattttggatcgccggagaagataaaattatccgtgcactaagacgttatattcgtcgtgataaaggctatgagcgcggacagatttatgctatcccttattggcgttttggctttaatgaagaaggttatcatgcagagcgtcatcatgttatggataatgaagatgtaagctaagcgtattttagataaaacgagttggctgtaccggcagcatattaagaccctcatttaatatgctgcctttttataggaatgataatagcgaagaaatctttaatatttaacttatataaacaataattcacctaacacaactcctgacaaaacaaacaaaaaaactatcaactcatcaaaattaaataaataacagaaataaaacccaatttacacagtcaatttaaacaaaaaaatataaaccattaagccaatcaaaagttttcactaaaataatatttaattattattgaaacagaacagtaatttaattattataccgcagcttgacgttactctttattagctaaaaataacatattgaacttaatttatttatatttttagagtgaaaaattcaaaaacaatagcaaataataattttattatcttcaattgattattagaatttgactgagtcaaaaaataatagagattaacctaaatctatgtatttttactattgaattaaggatgaaaaatgaattggtacttagaggttattaaaaataattatgctaatttttcaggtcgtgcgcgtcgaaaagaatattggatgtttatagtggtaaataccattattttagctgtgttatatgggatcatgttctcttctatcgacagttatactggtgaaatgagtggtacaggctttgctgctttgattattatcggtatctactctttagcaactattattcctaatattgccgtgacagtgcgccgttttcatgaccaagatagatctggttggatgattttattatcatttattcctttcgttggcggactgatcctgtttatttttatgtgcttagatggtactagaggtgaaaatagatttggtcttgatcctaaagcctaatagctaattaatttctatcttaatacagtgagtaaactatttatataatttacttactgtattgattctcctttctcttacagttacttctcttatcccctattagcataggattttatgcctgattattttaagtaatattatccacatactattatgctcatgtatgccatatagtaatttaaataacatgaatgttttttatcggcagcatattaatactcttatttaatatgctgccttttttattgctatgctaaagaaatattttaatcactatatgctgctaatacatgctgacatagactagaacgcacacaatcttcttcattaaatttaatgacaccaacacgctcattagcttgaaaacgacttagtgcatctgctaatcctgaatttacattggcaggtaaatcgcattgagtaatatcaccgttaacaatcactgtcacattttctcccattcgcgttaaaaataatttcatttgattaatggtgacattttgcgcttcatccaatatgacaaatgcattttcaaaagtacgtcctcgcatataggcaaatggggctatttcaactttgcctatttcaggccgtaaacaatattgtaaaaaagaggcgcctaaacgtttaactaatacatcatagacaggacgaaaataaggcgcgaatttttctgctatatcgccaggaagaaaacctaaatcttcatcagcttgtaatacaggccgagtaacaataattcgctctatctctttattaataagggcatcagcagccattgctgcacttaaaaacgttttaccacaccccgcttcccctgttgcaaaaaccaaattttgatgtttaatagcgttcatatattggcgttgaacttcattgcgaggagagagtgttcgttgatcacgtttctctctcgccataccaattgtttctagatccccaaatcctggtaaaaccataacattatctcgatgggcggcattacgttgctctttacgtaatgtacgtttattttctctacgtaaacgtgttgctactttttgtctactcataatggtatttacctttgttagtctcaaaaagtcatcagaacaatcattgtttgactagaaaataaggtgagcctccctcagactctattgcgctgtagaaaacaaaaaagccggtcacaaacttgagcattaaacatcaatgcacagttgctaccagctttgtcttggtgatttaaaattttgattgcttctgtcattcatattccccatcatggagttagagtgaaaattaacgaagctttatgacagtataatgacagaacaaaaattttttcaatatttaagtcattaataacgcgattaagttaacattttgctaacaaagagcgctattgaggggaataaaatgcgttttttaaaattaccttttatttattggctgctactcaattgcatcccatttattggctttgaactacactcaggcaatataaaacccggtgtttttttctatttaggtgctctaacgatcatcacttcagggatttggctatttttctgcctttacttttttatcaaacataatacatctcctaaccctcaccagacaccgcgccatttagtcaccacaggtccatataaaataagtagaaatcctatgtatcttggctttctcgatattagtattgggctgttttttatttttggtaactggggatttttaggggctgcgcttgccttctactttattaccgatcgctatactattgtgcaagaagagaaaatattaagtgagcggtttccacaagcgtggcgacaatattgccgccacgttcgacgctggatataacagatgtagactaaagcgctttacagttatttgctaatcggtaacccgctttagttgcttcattttcggttttaaaatataccgcatttttatctgacatggttctataaccagtacagtgtgaaaaatgataaattttactatttagattacctttgatctgctcatcttgggagactgtgggcgctttaggcatttctattttgtcagttgtaggacgatatgttgcagttaatcctgcaccactatttttatgtcctaactgccacttcatttgtcccgtaacaaagggattatgatgcccaacaatgttagcaattcgattatctcgctctctttcccacggtgttggtgggtaagctttatcccatgccataaaaagctgttgttgttgacgtgacattgagaggttataacgatcatgtaagtagaaatagacacgtgcaacttggcctttcacctcattacgaggctcaaaggtgcgagaagcaaaatcgacccgactgcgacactggccatattgataaggcgcttgagatgataattgaccaaagctaaaattactgcgatcaccattcacctctccaatcgaaggcgctagattatgtaaatcagcctcaattttgccaaaaataggatcgtttttaacacagttagctcgcccaccattttgccagcattgacgttgatgaccaaaaacccaagcagggacgatatgttcccattcaatgcgtgaagctcgggtggcttgtgccctcacttgataaccacaactggctaaattaacacgtccccccgattttcctacccactcccaatgacaaccacaatacagcgtaccttggttgttttgattttgatcataataaatgcgttctctggctagctgttttgctttagtgaaattttccggtgcctgtgcggatacatttagcgtaataataaataaacctaacgctaaaacaatatagtgtaatatttttctcaaagtgctatctaccttatactctcttttattaaacctaataagatttattattaaataaccaactaataatcttatttttatttgcgcttaccataccttttttatttatttgaagatatctttttaattcattttttgatggatttactaaaacaatacaaatgaaaagtgctagaaaaaggcgctattcatgtcattgtgtaaaaacatctttgctatggtttaaagattggtattttaatggaatagataaaatgaatgagaatatgctgaatttaatgaatgagctcgtggaaataaccaaaaagcatgcgaacaatgaagatgttaaagcgcatgctaatttagagtcagaaaataaattaagaattcaaattattatttctggtaaaaacgaactggatattacattaaattcgctacaacatgcggtataaagcatttatacactgggacgtttacgatataaccacaatcctggtaaagatagcccaatagaaagagcacccacaataaatgaagctttaagaaaattagtcactaaagcttcaaaaatttcttcgctatagcctatttgagtcaacttcaccacggagatcatcgcaacataagcattgatcccaggaaacataggaataatcgctgcaacagtgaaaacttttggatgagctaaccaccagcgtgaccattgaatacctatacaaccgactagaatagcggcacaaaagcttgcccactcaatattcataccacttatcattaataccgtacgagagccatgccctattgcacctaacaacgcacaatattttaatgcacgtaacggtacattaaataccattgcaaaccccaccgcaggtattgccgctaaaatcatatcttcaattagcgttagaataatgttgattatgcccaatctcttaactcccatactgccatcgctaaaataacccctaagcaggtagcaagtgttaacatcgtcgccatcgcccagcgtgcgagtcctgtattaacatgacctttaaacatatcagcaacagcattaattaaaggaaatccaggaactaataatagaacgctcgcggccattgatatagtggcagtaacttgaaaataagggagttttagcaataaacctgatactgatgtcgcaacaaatgccgtaatacaaaagttgattaaaggatttacttgacgatgagtgaggagctgacgaacccacattcccattcctccccccaaagcagagactaaaaagccatcccaatcaccgccattcaatttggaaaaacatccacaagaaagtgcaaccataacaataattatccaacgtggataacgtagtggtttgatatgttcaaaacgtttccttgcttcatcaatatccgcgagatgatgctcaactaaaataacaatgtgctgaacttcggtaacaacatgcatattgataccacgatcaacaatttttcgtgttgaggtttggcaatgaccattaactattgtcgttaataccaccgcattggctgaaatggccgtttcaacttgatgaacgcctaaagccagcccaagtcgcgttgagagctgttcaaccaacatactttcagcaccatgttgtaacaacaatagcgccgtttgaatacataatttcgtaatttcacgctgtttatcttgtgaaatggcatattcttcagccattatctgattatccatactacgccttagtatttatcaaaaaacgcgccataaccaattgaaagcttatcagtatagttcaatcatgacgctatcgtctttctatactattatgaataattaaaatatttaaggctgaaagtagatcaaagttttctcttactatcatatgattgtaataaatataaaatatagtgattatatttctcaaatagtattgatattagtcatcatatgttgccaaaggaaatcaagatcttccggaataggttgtgaattaaataactgttttttaagttctttttcttttatattaccaatatgagaaataagcacaggataaactacatttttaaaaaaatgtttcccgtgtatatattgttttaattgttgatctactgtgcatgcatttatttcttgctttttatgcttgagtttttctaataattgagaaggctcaagatattgatgccacttttgtaaaatttgttcaatttttactgtatcattgcttgtattaagttctaataacgattctttaaatcccaaacttcttaatccttcccataaaggattaatgattgcccataccgcagcatgatttcgccaattttcaagctgagtctcgatatctttccttaatgtttcacatccattttctatgctatttttcttattttcaggtaatgcagaccaaatttcatcaggaagaacaagatagttctcaatacaaaaacgaggaagaatgaataaattgggtaattgttcttgtttttcctcaattttagcattatcccattcatctctatcgacaataccaagccaatcttgttcttgggctaaaatatccaacatattttgtttcttgcccgtgctagcaataacccaatactgttcccaactaggaaacttttttcttaaaaaagcgccaaaagctaactcatcatcactgccttcaactaataatacttttttagttgagctacctacttgttgatcttttattcgattaattgttccatcaattttcgacattcaccgatccttttagcaaagtaagatcaatacgtgaaccaaaattttcatagcgttgccaaacttctgttgagtgtgacgttaaaattaactgccctttcttattagccacaatattttcgatagccgctaagagaggtgctataacagaaggatgtagatgtagatcaggttcatctattaatacaattcctcctggttttagccaacgttggattgtaaataacataataagtatttgatgttcgccagaacttaactcatcaaacgtatgttgccttccatttgataaaataatctgttgacgtgtacctggaagaatttcactatcaattcttttatctgaaaaaaagtaatttaaactctttatcatgttagggtattcattaggcagtgtcgcttttaaattaaacagtgaagtttctatttgcccattccaatcattagtcaccgtataagtcgcgagccatgcttggttaagatcgtctgggtataatgattttctcgttgctgttggatttacccatttacgcgcttctgcatctaaatagacaatattaggaatagataattctggatccaattcattataaagtgattgaatacgtcttttccctaaatatttataggtctcaatcagattatcattatgtttattttcactagatggaaaatataatttatttttctttttattatttgaaatttcacctatccacattacatctaaatagtttgttactacttgggaaaaaaaatcatctgaaccataaaaaagtccaattttaatcttatcatcagaagaaagattaaaatcttcaaaaataatagcgatccctccccaacgttctaaccattttcgtgtattgctcgctggagctaacggttgttcagtacttagccaaatacctaatgcttcccataaaatagctatgccccgtaataaagtcgatttaccacaaccattattaccggtaaataaaacttgagcttcaatctcattagaccaatcatcttctaacttaataacaccatcagctaatggtcctacagattgtgtataaattgaactaattctcattggaatgccctgaaatgtttactttaatagctaaaataccatctctttattctcgcgtctttacctctttcacacaacgataaaatattctctttctattgttaacttacatcatcaatatgactattacgctttcaaattagtataaaagcaccttaggatgcttttatacctaacttaacttattcataatcctttatttattatttattgcccagaagtttattagcttgagcataagccccatcaagggtttcttcaacaaagataggtacaccgtacaccgcagaaacaacgggagataactgcatcagttgctctttatcatttgtttgttgattgacggtcatgatcattccagcacaatattgacttaatggcattttccctgttttcagccagcgtctaacggctttcatgccctccatatcctcttgttcatttttcttgttgataggtgggtaaaccaatacaaagttttgtttttgagcaagcactaagtccatttcagcaatccagttattagcatgctctaacgtttctgggaaaacctgcatggtaataatgggaaattggtcaacagacattattgtaaaattgttattattcaacatattgttatctctcagtcattatctttactttagattagaataattatcatttacattcaataaaaaaggctctttattagtgcactgatcgcattaatagacaatttttgtcagcaataaatttctatcgacttatattatatttattcttttaatatataaaacactataattattttatatattctttataattattttatttttaataaataagctattcataaaatgaccactttataaatttgaaaatatatttaaagtcatttaaagattatcatgacagaattcattaatttataactaagagaaaattaatatggtaagttttttgagaacaaagtccgctgtcttattatcaatagttatttttcctattttctttttattatcaggctgtttttcattcgggttaatgttatcaactaaaaatgataatggctatcatcgttctcattggaaaggcgattcaattaccgcactctctctagcaaaagatagtaacggtactagcggatgggtatttattggtgagcattttgattatttattaataagaggtggagataacgcagtaaatattttaagagatcctcttatccaccatgataaattgagcgtagaaaatccagttgaatttattattgataatcaaaagaagcaatttaatgggaaaattaaaataaattataactggataactcaaaccgataaagaagcagcactaacttacggttttatatgtaaaaaagatataaacacctgttcactaaaaatagataatttacttggaacagttcatcaaaaaaataaagaacaaaaaaatgagtatttactaccttttaaccatccctttaatgttgaattctaccaatacaaagaaaatcttattggtgccagcacaccaagaatattattacccgttactttggcgctagatatagttacatctcctttacaattgctgatgatcccaatactaagcaagtagtatcgataaaataattgattatcaaacactaaatattctagtttgattaataaggagatagtgttacctctatctccttttataccatattatactatgatgttagcctatttcatcgcttataggattaacgcacaaccaacacagattgtttggcgtaagccacaattcctgatgcattagagcctaataaatgagttgaaatgctaggacgacgagagccaacgacaattaaatccgctttaattttttctgccagctctaacactttatctcttgctgagccaaatgcggcagagaaatcaacttgctctttaggtaaatctacagaattagctaattcttgcagttgttcttgaactcgttcaatcgctttattagcaaaagagcttaacatatcataatggtagctataactaattgaaaaacgtgaaacatcaggaatagcatgaaacaaatggatcttagccccttcaagctttgcaatataaacagcgtgttgtaaagccttttcggttaattcatcttctgaaatatccacaggcactagaattgtcttatacatagcaactcctcattattaattatcgtctgtttgttattttgattttttcaaccaacagtatgattgctaatcctcttcaagatgccatttatgtaattgtcgatgaataaaaggggtcaccactaatccaatcgataaaataaaaacacactgaagaaacaaaccataaatcgcaataaaaaaacgccctgttggtgttgcaggcgcaggctctaccggttgaccacttaacattgatattgcgtttaatgaggactccataaaagtatgtccttcaataaaatagaaccctagcacgcccggtaataatcctaaaaaaaagaatacagtacctattatatagtagcgtagaatacgtagaataaaatggtcgagccttaaaagttcttgtgtaaatttttccatcccattgactctattaatgcgcaacccaatgaaaataatttaataatggtaaaatagataatttaaaagagaaaaaataggttatgaaacctcataacctattagcatgtgtcaattaacgaaccactaacacagaaatatctgcataacgaacaacgcctgcggccgtagagcctaataaatgtgtgctaatgttgggtctgcgagagccgataacaattaaatctgcttgaatatcttttgctgtcgttaaaatttcatcacggggagagccaaaagtgacagtgtaagccactttttcagcaggcagatccaccgaatccaccaacatttgcatatcattttcggcttttactgtcgctttgtctttaatttcgggataacccagtgaataagcattaataatggctgaagagataggaagcacatggataagatgtaaattagctcctgtttctttggctaaataaacagcatggcgtactgctttactggttaactcttcttctacaatatcgataggcactaaaattgttttatacataataactcctctcaactctccatttgccttaatagtatcgcaataacctcaagattactgtgagtcaattaactaaaaccaacctaatatcaattatcaatcggctttaagtattaatgagttactacaaaaaataaactactcagttaaaataaatcagtgctgtgctgttggtgggttgcccacatttggttgcgaaccgcacggatggtatcaataagctctgatgcggttaatcctattggccctattccttgttttattaattggtctgcggcaataccatgtatccatacggcactcggcacagcctctgcgattggcataccttgtgctaaaaaacttgccatgacaccggttaatacatcaccgctccctgctgtcgataatccactgttccctgttgtatttactgtgatatttccttgaggtgaagcaatcaccgttccttgtcctttcactatggcccagcaatgatattggcgtgtaatttctattgctgcttgttgacggttattttgaatatcagcaacatcacaatgaagtaaagttgcggcctctttcggatggggcgttaatacacaattagcggttaaattcgtgttaatatgcgataagtttaattgagccaataacaccagcgcatcggcatcaaaaacataaggtattttctcgttacgttgtgctagtactgtagtcagcaattgttccgaatcagaggagagccctaaaccgcagccaatcgcccatgctgatatttgtggttgctctaataatgttatggctgtttgtagcatcagttcgggtgcactatcaataaaaggcagtggcaattgtggttgtgcaaagcccaaaaagactttaccacaccctgctttaagcgcactttttcccgccaaaacaatcgcaccactcatgccttctgagctgccgataatggctaatgtaccaaaagtgcctttatgtgtatttcccatatttcgctgagcgagtgcaggatagtgagatattgcttgtaatagttgctctctgttcatctattattcctcatattcctcaccttttattgctgagtgtttatttttatatcaaaccgcattaaacggtaatgggtaatttaaagtatagcgtgatatcgatgacataatcataataagagtgtgctagcggaaatgatttcttatctactatttgtttattcgttttattcatttatttcttttatgggcgataagaaaagctattcataccagatgaatacaatgttattctgttactaggcattatttttaggttaataaacaaacgatataaagggaaattcaccatgaatgagaagtttaaaacacaagcagatgttgaaacattagcgcaagaagttgcatgcctaaaaacgcttgtgacttatatgttaaaagcattaggtcaagcagatgctggacgcgttatcttaaatattgagcgagctatttccgaagttgctgatgaacaacaagcagaaaccttccgcaacacattaaaccaaattaaaacagcttatcgtcaataatgatattgacgtcatcaaagtgcaattgcgcatgattttaatttattgtcgcttctttttgtgctgcacaaataagcaaaaagtaaatctgaaaagtctatatacttaattccgaaataaaccattctttattcatttaactgcccctctattgttatagaggggatttttttatctgtaataaataactaatgttaatcctattctgatttaacgctatatgggtttatatgttacacttacagtgtacgcaccaaaaataaaccatgaggcttataatgaaaccacttctgttatccctgcttttacttcctgctgttgcatttgctaacccaagtaaaatggctgaagattattgcaatacattcaaagatatctcagtaaaagcttatgatactaatgaagcgcctgagaaaatcgccaaagacgcattagcaacattgaaatctcaaaactttgattttgcaaaactagatgcaacggaagctgatttttctaatggcaccgttgaagttgttaaatctttacgtgatgcaaaagcagaaattggttcacgtgaagagttccaagaaggcttaacgcaaattgttgcggcatgtaaaattcaaatggattctgttttacaagagcagaaaaaataatccattgactgccttaaatgattaagcgcagagtccaaggagcagaaataatcctgctctttttttattaaaactcccctatttcatttcttacgtttaaccctgctaacttttccctgccgctatttattgtgcatgatagtatccatctattgcgattaaggtttataatactttagtaaataatcattagaactggccataacaaggagatattgtgagcaacgaacaatccatccagcgattaagaagactacgccagtcagagaacctgcgcgcgctgtttcaagaaacgacactcagcaaaaatgatctagccctacctattttcgttgaagaaggcttagaggattatcagccgatcaaaagtatgccaggtgtggtacgtattcctgaaaaacgccttgcttatgaaattgagcgtatcgctaaagcgggtatcaaaacggtcatgacctttggtgtctcacaccatcttgatgaaacaggtagcgacgcttggaaaagcgacggtctagtttctcgcatgtctcgtatttgtaaagatgctgtaccagaaatgattgttatgtcagatacttgtttctgtgaatatacttcacacggacactgtggcgttttacatggtgaacatgtcgataatgatgaaactatccataatttaggtctacaggcggttgccgccgcacaagctggtgctgattttattgctccctctgccgcaatggatggtcaagttgccgctattcgtgctgcattagatcaagcaggatttaccgataccggtattgtttcctactcaactaaatttgcttctgcattatatggcccattccgtgatgctgctggctctcgcttaattggtgatcgtaaaacatatcaaatgaatccgatgaatcgtcgggaagctatccgcgaatcattgattgatgagcaagaaggtgcggatatgttaatggttaagcctgctggtgcttatttagatattattcgtgatgttcgtgaacgtacactattaccgttagcagcctaccaaattagtggggagtatgcgcaaatcaaatttgctgcattagcgggtgctatcgatgaagatcgcgtggtaatggaaacactaggctccattaaacgcgcaggtgctgatttaattctctcttactttgcgcttgatttagcagaaagaaatctactttaatcacccttgtatctagatgacaagtgaatagatcactaggaatcttcagtatatgactaaccccaccactaaaaacatggcggttagatacgctaaatacttcaagttataacgataatttgaagtatttttcaccctatattatgaggcgactatggataactgtattttctgtcaaattgtagcgggaaaagcaccttgccataaaatttgggaggatgaacatcatcttgcgtttctttcaatcttccctaataccaagggttttacggttgttattccgaaaaaacactatccaagttatgcttttgatttaagcgatgaagccttagcgttattgatcatcgccactaaaaaagtggcaaaaatcctagataaaacattcccagatgtgtcacgcacgggaatgttttttgaaggttttggcgttgatcatgttcatagcaaactcagcccaatgcacggcacgggtgatatgacaaaatgggcgcccattgaaaacaaacaaaaggttttctttgataactaccctggctatctttcatctcatgattttgagcgcgcaaatgatgaggaattagcgcaattagctgcgcttattcgccaaaatagtcagtaattgatccagccataataaactaatagcaataacggataagcatttattacttatccgttattagttaatattgcacaattattctttatttatacgtaattcgcgttggcttagctaacataatttctgtcttagccggctcggtttgtgcaatcactttaccgtgacgaatagagtaacgtacagggacttgacgacgtaaagcatcaaaaccattttcagcaggaagaataataaagttagcactattaccgacttccacaccataatccgttaatgccaatgtttttgcactattatgactgataagttgtaatccattatcaatttgcccatagcccattaactgacaaacatgtaaccccatatgcagcacttgtagcatatttgctgtacctaatggataccatggatcaaagacatcgtcatgaccaaagcaaacattaataccactcgctaacatctctttgacacgggtgatcccccgacgttttggataactatcaaaacgcccttgcaaatggatattcactaatggattggctacaaaattaatgcctgacatttttaataaacgaaataaacgcgaagtataagcgccattataagagtgcatagcggttgtatgacttgctgttacccgtgagccgatattttctttatgtgctaatgcagcaacggtttcaacaaaacgcgattgttcatcatcaatttcatcacaatgcacatcaataagtcgatcgtatttcagcgctaatgcgaaggttttatgtagtgactccacgccatactcacgggtaaattcaaagtgcgggattgcccccacaacatccgcacctaatttcaaggcctcttctaataatgcttcgccattagggtaagataatatcccttcttggggaaatgccacaatttgtaaatcaacccaaggtttgacttcttgtttgacttctaacatggcttttaaagccgttaacgatgcatcagaaacatcaacatgggttcttacatgctgaataccattggcgatttgccattgtaatgtttgccacgcccgttgtttaacatcatcatgggtgagtaatgcttttctttctgcccaacgctcaataccttcaaataaggttcctgattgattccagtttggctgtcctgctgtctgcgtggtgtctaaatgaatatgaggttcaacaaaaggagcgtgaaccaatccaccttgtgcatctaacccttggggatgaaaatcgctttgcggttgtggctcaatggctgcaatctggttatttttaactgtaatgcgccataaaccttcttttccagctaaacgagcatgattaatttgttctatatttttacccagcatgacttatctccgcttgtcgagctgtacgacgatttaatattggatttaataccgcgtaactgattgcgccacctaatacggcattaacaggtacgatccctggtaaccagtgaccggcagcaataccgatggccacagcaagtaaggctacccagttcacattttgcattttgtcagcattgaattgattataccgcgctctattcatcagataatctgcaataataacgccacctacaggggggatcgccgcggatagaaaggttaaccaaccaacaaaattattataaagccatagcgcacacaatgtgccgataatgccattaaccacagataattttttactggataaccctgtgatattggcaaaacctaaccctgatgcatataacgcattatcattggtcgtccagatatttaaacctaatacaatgatcgccggcagtaataaaccttgcgctatcatcacatcggaaatatccgccatgcctaatgatgccgctcccgcagcaccaaagacaaacatcaaagtatttcctaagaaaaaagccacaatagcgacaatcacggcaattttagggttacgtccaaaacgaacaaaatccgccgttaatgtaccggcactaataaaagagcctaccaccatggcaagggctaaattaaaatcaagttgttcggcaggcttcacagccattagtgtattaagccctcccatatcatgtaccgcaagatataccgagtaacttcctaggatagcaatagcaggaaccgcaataatggagaggatagttaatgcagagataccaaaaaacacggtgatagtcattaaaattcctgatattgcaatcaggagattaatatcaatccccgtggctttaccaacgggaatagcaaacatcgcaacaccgacaccaaaccaaccgacttgtgtaccaccgagtaaaaatgagggaagccaagagcctttaataccaaaagagtaacgagcaagaagatgagtggtgagacctgttttagaaccaataaaaccaagaaatgcggtgtaaataccaaggagaagattaccgataagaactgcgaggaagaaatcattaaaggagagaccagtaccaagagcgccgccagtccacatactggctgaaaaaaacgttaatcccaacatcacaaaggttaacgctaatccaccctttcttgcggatatgggcaccgggccctgactataattgttgtcctgagacactttaaccccctattcatttcaccaggccaaaaaatctgacgcattctatcggcataaaaattttatgcaaacgttttcgtactctgtttatgataattaatgggatcggtgatagaaaaaaaattgatatatctcacatcaatcctgatgttatggttgttttacttgagtcactcgacttatttaaaatgattgtaaaaaggagattgctttagaaatatttatgataacaatggaaagttcataatcatttaattatgaaaaaatacataaataatatttaataaaacttaaaaaaataaaataataacgaaaaaagaagctttactttcagtcacaaaaaagaggaattttcattcctcttgactattgttttgataagttaattaatttcttctggcaggtgaatgtccagcaacatagtaatctgcttggcttgctggcaatggtttaatgcctttaattttgtctgccattttttcagcaatcataatggttgtcgcatttaaattgccagtaattatattgggcataatggaagcatcaataactcttaagctttctataccatgaacgcgtccggcaccatctacgacggccatttcatcatttcccattttacaactaccacaagggtgaaatgctgtttctgcccgttcacgtacaaaagcatccagctgttcatccgtttgaatatctttccccggactaatttcttcaccgcgatagggatctaatgcaggttgcgccataatttctctcgtgatacgaatagcagccctaaactcttgccaatcttgctctgttgacatgtaattaaacaagatgcttggatgctgatgtggatctcgtgaggttatttttatacgtccgcgactgggtgaacgcatcgaccccacatgagcttgaaaaccatgcacttccactgcattactgccattataattaatcgccactggtaaaaagtgaaactgaatatttggccaagcaaacttttcacttgagcgaataaaaccccctgcttcaaattgattgctcgcgccaatacccgttcctttaaataaccactcggcaccaattttaggttggttataccattttaacgccggataaagtgaaacgggttgtttgcattcatattgcagatacatctctagatgatcttgcaaattctgccctacacccggtaaaacatgtactggcgaaatatcaaactcgttgagaacatcttcagggccgacacctgagcgttgtaagatttgtggtgatgcaatcgccccggcacaaagcagtatttctttacgtgctttcacatgctgtggcgtggtattcgttcctttaaaatagcgcacaccacttgcttttttaccctcaaattcaataatatcggttgtagcatgtgtctcaatagttaagtttttgcgcgatttagcttggtcaagataaccccgtgccgtactggctcgacgcccatggggggttaccgttctatccatagggccaaatccttcttgctgataaccattgagatcatcagttctaggatatccagcttgtacaccggcttcgaccatcgcatggaataaaacattattcccctttttcggtgtagtcacactaacaggcccactatcaccatgataatcattagccccaatatctcgggtttctgctttacgaaaatagggtaagcaatttaaataattccaatcttcaaggccgggtaatttggcccactcatcaaaatccatcgcgttaccacgaatgtaacacataccattaatgagtgatgatcctcctaatcctttacctcgaccgcactccatgcggcggttattcatatgtggctcaggctctgtttcataagcccaattatagcgtctaccctgtaacggataagctaatgctgctggcatttgtgtgcgaaaatcgaacctgtagtccggtcctccagcttcaaggagcagcacagtaacatcaggatcttctgtcaagcgggtagcaagaacgttaccggctgaaccagcaccgataataatgtagtcatagaccattgttatctcctctgtttcagtcattaaaattaaaaatagaatggattaaaaaacggatgaaaactccccaagttcaacttgaatagatttgatttgagtgtaattttgtagtgtgacaagcccattttcacggccaacaccggaatgtttataaccaccaacaggcatttctgctgcagattcaccccaagtattgatccagcaaattccggcttctaattgatgtataacgcgatgtgccgttgtcagatctcgagtcaccaagcctgcggctaatccatagacactattattggcgcgtaaaataacttcatcttctgtttgataacttaaaatgctcattacagggccgaagatttcgtcctgcgtgattttcatatcatcagtacaatcggtaaataccgttggcgccacataagcccctttcgccaatgcaccagcgaataaacgttcaccaccacaaagtagttttgcaccttgagctttacctaactcgatatagcttaaaactttttcaagatgagggaagctgactaatggtccaaagttggtatccatttccagtggtgaaccaacgcgaatacgagagacacgctcaatgattttagcttcaaaagcttgttttaacttttctggcacaaatacgcgtgttccattggtacatacttgtcctgaactatagaaattagccatcatggcgatatcggctgcggtatcaagatcggcatcatcaaaaataattaacggtgacttaccacctagctccatagtgacatcttttaagcttgatgaagaagcgctcgccatcacttttttcccagtatcgatcccccccgtaaatgagaccttagcgatatcagggtgctgcgttagccattgccctacagtggcatcacccgtgaccacattaaataccccttgaggcaaacccgcttcagtatatatttcagccaattttaatgccgttaatgatgtcatttcactcggtttaaaaatcatcgcattacctgctgctaatgcaggtgctgatttccataacgcaatttgaattggataattccatgcaccaatgccggcaacaacacctaatggctcacgacgggtgtaaacaaaagcgctgtcacgtagtgggatctgctccccttctagggcaggaataagacccgcatagtattccaatacatcagcaccggtgacaatatcgacataacgtgtttcagacaggggtttaccggtgtctaacgtttctaaatgcgctaactcatcattacgttcacgtaaaatatccacggcacgtcgaagaatacgggagcgcgccatcgcaggcatggcagcccatattttttgtccttgctttgcactttctaccgcccaattaatatcttcttcacaggctgattgtaaatgtgcaatcacctcacctgtagcaggattaattgcggcaaattgttcacattcaggttgtgcgcaatcaacatatccaccatgaatataaagcttgtgtaacggtgggttttgcatattttctcctttatagtgagtaagttaagtctgtttatcctggcaaagattaagttgcatatcgatatactcatcagtaattttttttgcttctgctaacgaaaatggctcctcgctaagggcactacgtagccataaaccatcgattaaagcggccaagcctttggcggctaagcgtgctttatcttttgttaacgcacgtccaaattcataacagagattagagtacaaacgtctatcattaaccttttgtaaacgatgcaaattaggctgatgcatgctacttgcccaaaaagccagccaagttttcattgcggtttcactggtttgtgacgtatcaaagttaccatcgacaatggcttgaatacgcaatttaggctcagcatcgcttaaaatacgtaatcgcattgcgacggcaaaacctaactgatattggatatggcgcattgccgcttccaataaaccatttttatcacggaagtagtggcttataatgccattagataccccggcctttcgtgcaattaatgcaatgctggcatcttgcattccgacctcattaatcaccgctaatgtcgcctgaattaattgctgtttacgtatcgactgcatccctatcttcggcatgttttcaagacctaaaaaatacattgaacacttttattaaacgtttttttaattgaacattcaatcaatattaactattgtttatcacaattaattcacaaatgacataaggagcagatcgtgaaaatttgaatctttgcatataaatcaattgattagcaaagaatgcaacttttaacttttagatgaataaatttttggaatttctgatgacaactcttaatagctcaaaaaaaccacagaaagacaagctcaattctgttgtttttttcgcttccgcaacgctgattttagcgttctcttttttcactattttaatgacagataccgccaatgcgtggatcattaaaacactaggttgggtatcaaaaacctttggttggtactatttattagcggcaactttgtacattgttttcgttattttcgttgccacatctcgctttggtaatattaaattaggcccagaacaatcaaagcctgaatttagtgtattaagctggtctgctatgttgtttgccgcggggatcgggattgacttaatgtttttctcagtcgctgagcctattacccaatatatgctaccgcctactggcgaaggtgaaacaatagaagcagcccgtcagtcgatggtgtggacattattccactatggcctgacgggctggtctatgtatgcactgattggtattgcactcgggtattttagttatcgttataatttacccttgaccatccgctctgcactttatcctatctttggtaatcgtatttatggccccatcggtcatacggtcgatattgctgccgtattgggtactatttttggtattgccaccaccttaggtattggcgtagtacaacttaattatgggttgaaagttctcttcgatttaccgcaagggttaggtgtacaaggtggtttaattctactttccgtaattatggcggtgatctcagccacatcaggcgtcaataaaggcatacgtattctttcagaattaaatgtattactcgctttagggttaattttatttatcctatttgctggtgatactgaatttttattaaatgcgttagtacttaatgtcggtgattatgtaaatcgattcttaggaatgacactaaatagctttgcttttgatagaccgacggattggatgaatagctggacacttttcttctgggcttggtgggttgcttggtcaccttttgtgggcttatttttagcacgtatctcaagggggagaactatccgtcaattcgttataggcaccttgatcatcccttttgtattcacgctattatggttgtctatctttggtaatagtgcactttatgaagtgatccacggtaatcaaacctttgctgaaacagtattagcctcaccagaaaaaggcttttattctttacttgaactctatccgggatttggtttaactgcttccgtagcgactattacaggattacttttctatgtaacctcggcagactccggttcattagttttaggtaatttcacttctcaactgagtgatataaataatgatgccccaaattggctgcgcatattctggtctatcgctattggtctattaacattaggtatgttaatggcagacggggtttctgctttgcaaaataccacggttattatgggattaccttttagctttgttattttctttattatggcaggactatataagtcattaaaagtagaagattttagacgcgtcagttcattaaacaccaatgcgccagcacctctttatggtaacaccaccatgaactggaaacagcgtctaggtcgagtgatgaatttcccaggtactacctatacccaacggatgttagatttagtttgtaccccagcgatgcaagatgtggctaatgagctgtcattacgtggtgcaaatgtctcgtttaatctttacccgctggaagaagagcctcgtttaaaccatttagaattagtggttgatttaggccaagagcagcattttatttatcaaatatggccacaaaaatattcagtacctgcatttacttatcgtgctcgtcgaggaaaatcccattattaccggctagaaacctatttatgggaaggttcacagggtaacgatttaatggactacaccaaggagcaagtgatcagtgatattctcgaccaatatgaaaaacacttaaactttattcacttaagtcgtgaagcgcccggtgcaacattaacatttccagaatcaaattaattagcgactgagctatcttatctctcaagggaacccgttttatcggttcccttttttattagcctgcatcacacacctcatgcaatacatcgctattttctgactttatttcatattgacatgcttaagctaattcctaaaaactgacctaacagtgaataaataatcaaaattaaaacatatttatttacttattgtgtttttttagtaatctacataaacaataaaaatgtagaataatttacttgggaaacatcacatgaatcgtcgttcatttttaacatcatcaagcttagtgatcgggggactttcattaagttcgtttgttagcgctgcctatgccgcagaaacttcaaaccctaaacagctatttaatgcagaaaatcctttactgttaaactttaatgaaaactcgctaggcatgtcatccaatgccaaacaggcgattattgatgcacttccccatgcttttcgctatccagatgatgcgcgaagcgcacttatcagtgcattaggtgaagaatttaagctatcagacaaacacatcactctaggtaatggctcctctgaaaccatacaagcagccgtacaatatgtggctaataaagcgcaaaaagcaggtaaagcggcacaactaattgtgcctgatccaacgtttaattatgccgaactttatgctgaacctttaggtgtcaatatcgtaaaagtgccggttgataacacattggcttttgatttaaccgccatgcagaaaaaagcacaagcatttgatggtattagcatggtatatctgtgcaatcctaataacccaaccgcaatgctgacaccaacagcggcattaacaaattggatcacctcagcaaaagaaaatgtcttttttattattgatgaagcttacgctgaatttgtgacaacacctgaatttaccagtgcgatagcattagttgctcaaggttataaaaacttgattgttacccgtacattttcaaaaatttatgcattagctggattaagggtaggctatggtgtggcagtccctgaggtaattagtgaagtagatagtttcgtttctattgataataccaatactgccggtgctgttagcgcattagcctcgttaaaagatcacgcttttgtggcatatagtcgcaagtcaattgatgtatcacgacaaatggtggttgatactttaaacgccttaaatatcgagtatgcaccttctcacgccaactttatttttcataaagtcaaaggtgatgtgaaaacttatcaagagagaatgaaagcggcaaatattatggtaggacgtgagtttcctcccgcattaggttggagccgtttgaccttaggaacccctgaggagatgagttattttgtcgcgacgttaaaagagtttagaactaaaggatggatataatcctctacaaccaatagttataaatgtatttaaaagggaacgacacagttcccttgttatttacagatattctaaagaaaataatacttcaccatttgcacttcccccaactacgtccttattagttgcgatatattgcgcataaaaatcgagagaaatattattagttgtctctacagggtaaatcatactactttttcccggtaatattttattctgatttttatctaaaatagcaatacctatattttgagccgcatttttttctgccaacttaaacaaggtactatccttactgtcagtatcaccactaaacattacttttacaccgctagtaacaatactgcaatcagttaagttaagtgtaaactttactggctctgttgtatttttttgctgaaaatcttttgttccccaaacccctaagtcaacaaatttatttagcgaatcagggctgactctacaagtatttgccacaatgttcgcttttataacaatatttgtattagctaattctgctgttgcatctttagtaaaaaatactgtatatccgctaaaaagtagcattccccataatagaaagcgcattatttttctagtatgtaataactcattcatgatattagcctattaaaattaagggaaatcaactcttagaaagccacttgatgtgacagcgccttcagttggtgtttttccatcaatacttacgggataaacattaatcgtgacattagcatcagcattttggttgagtctgaaaggaataaaacttgataaatcattaggtgttaattcagatccacttgaattagcaaccacaaagccaacacttttattattagaaacaatagcattaccttgaactgaatctgcttgtaatcgcattgttaaatcagcactggcatctatattgtcacattgaatacttaagtttctagaaaccgtattaactccttcggcttttttccctgctactttaaaacttgatgcaggaatattgtcaaaatcaatattcaacacttgccctgaattaataacgcaagattgtggaactgtcattgaaagatttaaaaatagctttgtaatgatagtttgtttagtcgcacaattctgtggttggcaaaaaccaaattcgcctacaaaaatattttttacataggtaccagaaataatagccttgtcaatttttattctggtttgatactttcttacagaaacgacgctttcttcgttttcagtataagtacgggaaccacaagtagagcttagcgtaggtacattataagggacataaattgttctacaattattagtcattcttaacgcaacagaaatatagtcatctatcttagaataaatccagtcattattgctggtatttgcactaggaatattaccattggaatatgtcgcccatgtttgcgcttgtcccgcattccatcttaatgtaattcgattggacaaagtaatatcagaagcatctttagtaacaccgactttattttccgtctttgatagttgtccactaagcgtggaatattcattcgcattacaaccactgacacagctcacagcgactgcattatttgaaataatggctattattgtaaacaatactattctaatcataataaaatccgtaaatatgcttgtttttaatattggcatgtggaagaaataaaatagatacctttttcttttgatgacttctcattaatttggtaatcaaatatacattgttgatcagccatttttccccattttgcttttagcctaccaacaggtgctaaaccagagataaaaacattcccattatcgccaacaataccacttacggaacgctcttcatcaacaaccatcgcaccgaaaggtataatagcgccatcttttttgcttaatgtaaccattgctcgatagccaatattcgttttaaaattagcttcaaccaatgcccctttagtaggaactacattaataatcgtattttctaattcaatattttcttctaatgaattaacatctaatgaaactcgattatttttatatgttgaagcaaacggtaagacagcataaccattattatcagttaatataccatttgcattttctactttaatattattagcatcatttgctttaataagaatattggtatcccctaaaggttgagttaaagtaatacctcctgcatgagcaacaataccaccatttaaactataattaaactcatgccaatcattactataattatatccgctacctatattagcatatttacctttataattagcataaaccattcctgaataaccagaaccattatgcgtatatccttgttgaatattataatttaaattattgtcttcaaggagagttcctgttagtcccacttgattgacccaaacattgtcatcgcttctattcattgagtaaacagcatacatactatttctacttgaatgtaagtcacttacagtttgttggttaaatacatcattaagaggaattgatatattaaaagctacatttttattatcaccacgcatacccggtgattttaatttcgataaactaagactataatttatcctatcaatattagcattataacccagttgccataactgttcagtttcagttgtgcgccaatagttttggtaagagcctaaaatatacaaagaactattattggtaatttgctgatttatattaagttgaaacctcccttttttagaataatttaaattatagtagttagataagttatcctcatctcttattattccattatctgttactatttcacgccctgccatttttttataactaacttcatttagggtatagtagccttgcgttgaatatcgataccccattatttgaaagttagtgcctgtgctattaatcgatttagcataaagtaatcggaatgactgcccttttttatgctcatcgtttggcaatatactattcgcctgtattacatctgctgatatcgccccaaaggtgcctagattaccacctaaaccaatcgcataggcttgataattatttgaaaattggcttcctccatataacgtcatattataaggtaagccatatactaaacttaattgaccaaaattaggtttatcttgataatctgctccgctacgaaattcccctccaatcaattcgtattttaagcgtccttcacgttgtaaaataggcacatttgaataaggtacaacaaattgtgtaattttaccgttattctctttgattgtgacatctaaattaccgctacttgatgtggcatagagatcttttatttcaaatgcacctggaggtacagaaatttgataaataacaaaaccattctgcttgactgtaacaatagcattgctattcgcaataccctttatcgtaggtgcaaatcctctcatgctatcaggcaacatattatcatcagattctagcttaatccctctaaaaccaagactatcaaaaatggttccattagaaaaagagtcaccaagggttaattcagcacgtaatggaataataggtttttgtacatatgttcttatattcctccatttattttgcttactttcaccactggcatagttccatgaactttcatttctaaatcgccatgaaccaagattaataccaggatttaagtttaaaaaataattattattatcaacgttatccttaaagttcttactatttcttcctgtgaaattataatttagtaaaaacgcattaatcccattatcccatttttcaggtgggataaagccacgaacattatttttaaacattatttgtggaatacttaaaaataatttttgtccttcaaaatcgaatttaacacttgagttttctattttatctaaaatattctcacaagcactatctttactttctacctcttctgatttctttttgctattttcagttaaagttattccaaaatttgtcaaagttttattatctatacaaggtaataaacctgtatcatcggatgatgcatcgctttcataaaatattaaattttttgtttcaacatattcatcgtttacataaatttctactgaatacattccttcaggttggccttcacctttatcaaatcgagataaatctgctacttcattatcaatatttgaaattaagttaggattaaaaaaactatccgcatacaccacaccagaaaagcatgtacctaaaaagatatataaattaaaacatatagttttagattttagcataataaagccttatcattaatgaatgttatagcattacttaccaatctgtttcgttactttgggtgtactagcaccataatcattaatagtttgataagatatttgactatagttaggcttgctgactttaatcattactgttcccataggaggaaccataatactatttagctgttcattatcagcttctaaattaattaatgtcgcataataaggtgaaggattatttactattatgtttccttgtgattttttaaactcaagactattaggtacatcctctatgttaaaatttaatccttgaggtctaataaaaatttttattctagataatactgctagctgtaatatatttttatcttttatttcttctcgctcaatttcagggattgcttttgtatttaaccagaacaaactttctctatcatttggtaatgccttaccagcataaattattcttagcttgttttcactttctggtttgctgacaaacagtggtggtgtaacaataaattcattacttttttgatcttggctatcatcaatccatgattgcactaaaaagcgtaatcttttatctgtattattaagagtaattgacgtctgttttgcatccataggatagactatgcgtgttgcagctaatgcaacacctcccgcatatgatagcgatgaaaaactgaagagaaaaaataacgcaataaagtgtttagatattaaatgcatattaacctcaaatgataggtttatttattgataattgaaaacaaaccaaactacgctgtcagcttttccaccgataacgttttctttcgttgccagataacttgctttaaattttagttttaattcattctcttcaataaatttatacttattgaatttattaggaataattatttcaccttcatcattaaataatgcaacacctaatcctgaagctgaattttgttgatcggtgatgctaaataatcgtttatcattattgtttacatcacctataataattatactgactttatccgtaatacttttattacatcccattaatttaataaaaaatgggatttttatagagtgacttcctactccatgaaattggttactactaataacaccaagatcaacaatttgatattcactttcagaagatactgtacaagcaggctctacaattccccctttaaaagtcacaataccatcgtctaaagaaatattttccctgtcattagaataggctgtaaatgaaagagtaaaaaataggacaatagaatatattaaactatatttcatatttccctcgatataaaagtatgacctttatcaggtcatactttaaattaatccaatttatttattcatattgcattttgaaagttacatcagcatcagcatgaccaggggtaacggtatctaatgtagatttataacgtgcaacaaagttaagtgtatttgatccatcaattaactgttttgctgtagaaaaaacagagccgtctggtggtaacacttttcctgtatggtctgtaatttcaataccaacgcccgtcgcagcacccgcaccacctgttgtaatattgcttacagctaatactgttttatcatttgaatcacttacacctgaaaatgaaactgaggcattttgtgcgacagtcgtatcacaagcttctaaattgatataaaaatcagtattaccaactgttttccctacactatcaaattgtgcggtacgatattgtccaatattaacagtttgatctattgattttgtactaacaacacatgcagcattaacaatttctccagtaaaattaattttaccaccattaacaatagtcgctgcagaagcaacaccgctcagtgataaaacagatactgtaaatagagctttaactaacatcttttttttaagcattgacttttccttttacattacaggtaaatatacacaacaacttcacttataaattaaaatagtaaatctatattagataacaatatttgaatccatatactaattatatgataaagtgttaactgccttaataagggtaatttaataaacattaaataaatagggttttaattttaaataaaatccctattaattcattgatatacttaatatacttgccaccaataatattatttatcttacatttaaataatattctcaaagaatggaatattattatcagaatcatattttattttatattttaatgtgataactcttttggaaaccttttcaaagaaatcacttattgaaatatcaaatatatttagtatgtgaaaaagtatatcaataggtattttatttattcctcgttcataacgagaaatttgttgttgagagatattcaataattttcctaactcagcccccgtcatagaattacgttgccttaaaagaaaaagttcatatccaatcgaatgacaaaatatttttctttctgaaatatattcaaaattcaatgagaaattatttatttccaaaattcacttcctcaactgtatttgcatttaatttactttatgagattaataaaatcaattattcaaaaatttctaacgaattaaaaacctcataataaaacactaaataagagtaggtaaatatactcattttatttgtatcagggagttaattgattatctgatttgaatagtcgttttaagacagtgattaattctaaaattacgagaaaatagacacaaataagacataataatctattaatgaaaacatattaaatttttattaatttttaatagaaatattttttattgtttttgcttactgtaaaaccaagggttagtacaaaacttatactttttgtttcaaatgttattttaacaaagttacaataataaactttattaatgattatacctttatatctcatcctaaaaatttttacttgatataaattaatatttatttattttttttggtactgatatttgtaattagataagtttttttaaccattattttatcttattaaaaaataatatttttataactataaaaacttttgatattaaaatcataaactgataaaaacaacataattcattgataataaatgattttcatcattatcaacacttttcatatttaaaaaaatgataatatcaaatagaaaataaatttttagaaaaaatctattacaaataagtttatttgaatattaaatttttgagccatatgctttatatataaagaaaaagggcctgaataaattcagacccttttttctattaatataattttattatttattaaagcggatcgacttttaaacaagataccgcatggcggaaacttccctctaataaggggcgcgttttagcacattcttcatcagccatcggacaacgtgtacggaaaatacagcctgatggtggattaattggtgaaggaagctctccttctaacaaatcaatatgcttgttacgctctttatccggatcaggaataggcaccgctgacatcaatgctttggtataagggtgtaatgggtgatgataaacttcatcataagtccccaattccaccgcatgacctaaatacatcactaagacacgatctgagatgtgtttcactaccgcaagatcatgcgcaataaagatgagcgataatcccatctctttttggatatctttcagtagattgactacctgagcttgaatagaaacatccagagccgatacaggttcgtcacagataaccagttttggctctaagatcagtgcgcgagcaataccaatccgttgacactgtccaccagaaaactcatgaggatagcgattaattaagtttggtaataaccccactcgcatcatcatcgctttgactttttcaaccacttcagcctgtttcattttcggatgataggtttttagtggttcagcaataatatcgccaatcgtcattcttgggtttaaggaggcaagtggatcttggaatatcatctgaatatcttgacgaacatcgcgccactgtttattgcccatgcctaataagtcatggcctaaccaagtgactgtaccacccgatgctttaactaagccgataatggcacgcgcaaaagttgatttaccacaacctgattcccctactacacctaaggtttcaccttcgtataaacgtaaggtaacaccatcaacggctttgaggctttttttaggttgccagaaccactgcttattatcttgtacatcgaaataaacttttagatcgttgacttcgaggatcacttttctatcttgtaaggtggcttggctcatactaactcctccgccgctttaaaacaggctcgtaatcttccctgagcaaattgtgttaattgaggttcactattcaaacactgctctgttgcatattggcaacgaggctggaatgggcaacctttaggtaaacgcaataagttaggaggattacccggaatggtcgccaaacgttcatcttcaccatctaaacgaggtactgcttgcagcaatccaatagaatatgggtgtgatggttggtagaaaatatctcgcgcattaccatattccatggttcgcccagcatacattaccagtactttgtcgcaaatacccgcaaccacaccgaggtcatgggtgatcatgataatggctgtattaagctctttttttagctcgtttagcagtgtcatgatttgtgcctgaacagtcacatccagtgccgttgttggctcatcagcaattaatagttttggcttacataatagtgccatcgctatcattacccgttggcgcatcccaccagagaactcatggggatacatgcccatacgtttatgggcttcgggcatttttactgcatcaagcatgcgaacagattccgcatatgcatcatttttactcatacccttatgaagcataagcacttctattaactgagtgccgactttcatataggggttaagtgaggtcatcggatcttgaaatatcatggatatttcttcagcacgcattttgtttaattgactttggcgtaagtttaaaatttcacgaccattaaaatgagcacttccagcagtacgaccgtttttagctaataatcccattaaggcgaacgccgtttgcgatttcccagagccagattcaccgacaattcctaaggtttcccctgcagatagctcaaagttgagcttatttactgcggttacatccccatctggagtaccaaaggtgacacagagatcttttacacttaacaatggcttatttgttgaatttgtcatcatgttctccttaacgatctttcggatctaacgcgtcacgtaaaccatcaccgataaagttaaagcaaaacaaggtgacaactaaaaatgcagctgggaaaagtaataaccaaggagaaacttccattgaatttgcaccatcactcagtagtgctccccaactacttaatggctcttgtgtgcctaatcctaagaaacttaaaaatgattcaaataagatcatgctaggaaccagtaatgaagcgtataccacaacaacacctaatacattaggcacgatgtgtttaaggacgatattacgtgatgacacaccacagactaacgccgcttcaataaactctttacgttttaaactaagtgtttgtccccgtacgatacgagccatatcgagccaagataccatgccgatggcaacaaagatcagtaagatattttgcccaaaaaaggtcaccagtaagataacaaagaacataaatgggaaggagtttaatatctccagtaaacgcatcatcactgagtcaacgcgcccaccgatataacctgccatcgcgccatagagggtgccaacaatcaccgcgacaaatgccgctgcaatacctaccatcagtgaaatacgtccaccaattgctacacgaactaataagtcacgtcctgatgagtcagtgccaaaatagtgcgctgaggcaaaatcaggtggcattgacatcatttcccaatccgtatcgtcataaacaaaaggcgataacatgggggcgaaaatgacaaaaagtaaaatacaaaatagtagtactaggctggtgatcgccgctttattgtgcataaaacgacgacgggcatcttgccataaactacgaccttcaacatctagctgctccgagaaattccccagagcttcgctattttctttcatcgataacataacgtgctccagtctctattaataacgaattttcggatcgattacggcgtataaaatatcaacaatggcattaaataaaatggttaaaccacccacaataatggttaaactcaataccaatgagtagtctcgatttaatgcaccattaacgaaaagttgaccaatacccggtaatccaaaaatggtttcaatgaccatagagcctgtaataatccccacaaatgccggccccatataagagatcactggcagtaatgctggttttaacgcatgacgtagcactatgcgtttcattggtaagcctttagctttggccgttctgataaagtttgagtgtaaaacttcaatcatagaactacgtgtgatacgcgaaatacttgcaatgtaggagagcgataatgcaaccatcggcagtaacatgtactgaatttgcccaccattccaacctcccgccggtaaccaacgtaaggtaatcgcaaagataagcactaatagtggcgccaccacaaagctcggtatcacaacccccgtcatggcaaatgtcatgacggtataatcccatttggtattttgattcagtgcggctatcacgcctgcccccacaccaaaaataaccgctaatacaaaggccgatagccctaattttgcagaaacagggaatgctttaccgactaaagtgttaacactgtagtctttatatttaaaagaaggccctaaatcccctttcgataattgaattaaataatcgaagtattgtttgtaaatgggatcgtttaaatgatatttcgcttcgatgttggccataacttcagggggtaatttcctttccccagtaaaagggctacccggcgctaagcgcatcataaagaacgaaatcgttattagaataaaaagtgtcgggatcgcttccaaaaagcgacgaaaaataaatttgagcattgcccgttcctataacacaaacctattcaggcgtggtgataaaaagacctcgcttaacttaagcaaggtctcgcccgattatttagcaataatatacaagtctttagtatgtaaattatccagtggatctttaccagaataaccaccgacataaggtttaaccaaacgggtgtttacgtagtagtaaagtggaacaatggcagaatctttatctaatacaccttctgctttttgataaatttctgcacgttcatcatccgatttcacgcgtaaagattctttcatatacgcatcaaattgtttgtttttatagtgaacggtattattactgctgtaagacagcatcatgttaaggaatgaagaaggttcgttataatctgcacaccatcctgcacgtgcaacatcataattaccttggtgacgtgtatctaagaacgttttccactcttggttttcaagagaaacctcagcacctaagtttttcttccaaatagaagaggccgcaatcgcgacttttttatgtagatcagaggtgttatacagtaacttgaattttaatggattggctttgttataacccgcctcttctaataattggcgcgccttttcattacgttgctcttgggtccaagaagcgaaccactctggtttactctctttaatgccatcggtgaaaggcggtgtaaatccgtaagcagggatatcaccttggtttttcactttataggtgatgatatctctatccatagatagttttagtgcttcacgtactcgtggatcgtcaaagggagctttctcattattaatttcataataataagtacataagtatggactgatacgtaattcatctgggatctcttttttcaatttttggaaaaattcaatcggcagattgctataagtcatatcgatttcacccgcacgatagcggtttacatcggtgacttctgatgagataggtaaaaaagtgactttattgataaccgtatttttattgtcccaataggttggactacgctctaattcaatacgttcgtttaccgtccaatttttcagtacataagcaccattgccgacaaagttcgcaggttgcgtccacttttcaccaaatttttcaatcactttttgattcactggcgacatcgaggagtgagctagcaatttaggtaaataaggtacggcctctgataatgtgatttctaaggtattattatcaagcgctttaacacctagttccgtcggttttttcttaccggcgataatatcgtcaatattaacaatatgggcatattgtagataactttcataaggtgatgctgtattcggatctgctaaacgttgccagctataaacaaagtcttgcgctgttacagggtcaccgtttgaccatttcgcgtcttcacgaattttgaacgtccaaacagtaaaatctttattttcccagctagtcgcagagcccggtagaatttcaccatcaggccctacaatcgtgatcccttcaaatagatctcgtgccaatgcagattcaggtacaccctcaattttatgaggatcaagtgattgtggctcagagccattattacgcactaactcttgtttatcagccagttttaccccatcaggcacaacagccgcagtagcattgagcgccgtaaaaccaaagatagtaccaatggcgatcgctagcgcactttttttagttacatttatcatcttatcaaatactcccagttagtgagtcggccattgttcggccttcctgtgatgcttcgctgtgtttttggaacgttttacacaacttattgttttacaaaaaataaaatattgttgcggattgactatctatgcttaactgcatgatgtctttatcatttttgtgccgttatattttgtgtagtactttttatgctgtacttttttaaattgcttttgctaattaaaatcagatatagctatagatgcgttataacttaccagttttatttatctgcctttataaaatagcgctttaagtccgtataatcaaaggggtctttaccggtaaatccgcccactttaggactgaccattctgacactcacacgataatagactggtacaatagcggagtccttgtctaacaaggcttcagcacgttgatacagttggtgacgcgcttcattatcagtggccagtaatgcattctttaatgcggcatcataatcactattttcatataaaatagtatttagactgctagtggagaggaaagagtttaaaaatgatgttggttcattgtaatcggcacaccatgttgcccttgctacttggtaattaccttggttacgattttctaacgtcgttttccactcttgattttgtaaagtgacattagcaccaatattctttttccacatagaagcggcagcaatagcttgttgcttattctgatcggatgtgttgtacaacaatgtaaaagataatgggttttggctgtcataaccggcttcttttaataattcacgcgctctttcatgacgctgttgttgcgtccaacctgcccatttagggggtttaaacttgccattattaataaaaggtggagtaaaagaataagccggtatttgcccttgccccatgatcttttccgcgataatttctctatctaaacttaattttaccgcttcacgcacacggggatcatcaaaaggtggacgtttattattaagctcataaaagaaagtacataggtaaggcgtaacatgtagattctctggttgctcttgtttcatctttcgataaagcgtaggaggaatagcgctattggtgatttgaacttcaccgctacggtagcgattaatatcactggtttctgaactaataggtaaaaaagtcgctcgttcaataatggtgtttttgttatcccaataaagtggattacgttttaaagtgattttttcattaaccacccaattatcaattaaatacgccccattaccgacaaagttttccgggcgagtccaattgacaccatatttttcaacaatctcttttttaactggttttaatgaggtgtggtttagcatatccaccagatagggaaccggttgtgtgagcgtaacttgcaaagtatgtggatcaattgcttttacccctagactctctggggatttcttgcctgtcagaatatctgcaacattttccacataggcatattcaagataactggcataaggcgagccagtttggggatccgttaatcgacgccaactataaacaaaatcatctgcagtaaccggtgtaccatcactccatttcgcatcatcgcgtaaatagaaagtccatattttattgtcttctgagctctcccatttagcggcaacccccggcatactttcgccattaggccccatataagtgagcccttctaataaatttaaaataatattactttctggtaccccttccactttatgtggatcaagggaggaaacttcagtgccattattaataacaatatcttgttgtttcgcaagaagagtaccttctggaggtattaccgcatgagaaagaaaagaggtcagcgcaagtgatataatgctgacaggaaacatcatttttaacataactttctttttcatgggtacctctcctaataaataatcatctatagcggggttactcaatttacatataaattatttttaaataatattcagatatttcatgctatttaatatgttgagataattgttagataaaattaataacaatattcttcttttttacacttatagtgaattttgtcaattagtgcggtgttattatcacttaaactttactaagcccagtagacttctatcttatgaaaaaagaaaattctcatcacgctatctacaacaacaaataaacatttaattaacaccgcgcaacttttatagatagaaaacctacatagctcacaaaattaatataatcagatgggtttttagcgaggatacagaactttatgatgtgttcggtgtaagttttttttcacacaacttgattataaacaataacaaatctgtctttaaatgacagaaactggctaatctaaaaataacggtagattaataaaaaaacatttttattatttgtttttaaaaattaatatattttttgaaatacaattaaaatcagtactattttcatttatatcccgatgaattagcaaaaaaatatcctttatcgttgttatgaaccataaaggatattctgagcgttagcctacttcttcaaaatttttgctttaattggctaaagtcgtaccaaaccattgtagcttttgatttaaactgacgacttcaccaacaataattaatgcaggacttttcattgagcttgccatttcagttagttgctgtaattgaccaacaaccactttttgtgtcgccagtgtacctttttctactattgccactggcatagtggcacgcatatgctgattaagtaacatttgctgaatgtaatcggctttacttagccccatataaaaaaccaaagtttggttatcttgtgcgatacattgccattgtgcgtcgttcagcccttttccatgcccagtaataaaacgcacactttgtgcataatcccgatgtgttaacggaataccggcataagtggtacagcctgatgccgcggtaatgccaggcaccacagaaaaaggtatttgatgctcaattaaagcttctaactcttcacttcctcgaccaaaaataaaaggatcacccccttttaacctcactacccttttccctgccttagcgtgattaataagaatttggttaatctcctcttgaggaacacaatgaaaaccagctcgtttaccaacataaatacgttcagcatctctgcgcactaaatgcataacctcatcagagactaatctatcataaaccacgacatcggcttgctgacattgttgcagccctttaatagtcattaatccagcatctccagggcctgctcccaccaacaccacactcccttggggttggttattttccgctagcaatgtgctgatacgttgttgaataccgttatctctacctgcatcaatttccgcttgtagcgctttatctgcaaaaaaacgctcccaaaaatagcgtctagcacccatggtggcaaaacgttgtttaacttgctcacgtaatttccctgctaactgcgctaaagcgcctagcgagttgggcaaccactgttccattttttcacgtaagatacgtgcaagtactggggcttttcctcccgaagaaattgcaaccataataggggaacggtcaatcactgagggcataataaagctagcttgcttgggcgagtcaaccacgttacaaaaaatgcgttgttctgtggcctgctgatagacgagttgattcacttgctcattatctgtggccgcaatgactagccatttgtcagctaaatcagcaacactaaattcagccgtgaaacactgtaatcgttgctcgttttgccactgcataaattgtggtgtgaatgtcggtgcaacgacggatataaccgctcccgcttccatcagtaaacgtgccttacgctctgccacttcaccgccacctactaataaacaaggtttattgttgagctgacagaatattggaaaataatccatctgggtcccctatttattggttttatcaatgacgcgaacgcacactgacggtattgccttcgactttgacttcataatgagtaattgaatagttctcatcttcaaggcaataaccatctgttaagcgaaaatgctgctttttcagtggactgacgatatataactcattgtcatgctctgcaattaatccccgtgataaaacactcgcttgcgcgaagggatcaatattacttaatgcgtagagccgttcatcttggtatggacggaaaatagccacctgatcttgctccaccagcgcacaaacgccagtccccacagtgatgtcatctaattggcaaaccgctatccattgactcatgattgcgtctcctctgttaccattttgatatcaatacgttcatgcacgcgggcaggacgatgctgagcacgctcttttaccatctgtatattaggatcgggcatcggattgttaataaagtgcacaaaacgtttcaatgcttgtggtgaatcaagggtttcttgccactcacaggctacgcgctcttgtaaaactttaagctctttttctaactgtgcatttaagcctaacttgtcgtgaataatgacctcacgtaaatattcaacgcccccttctaggctttctaaccaaacggaggttcgttgtaatttgtctgcaatacggatatagaacatcataaagcggtcaatataatggatcagcgtttcttcatctaaatccgccgcgaatagatcgccatgacgtggtttcatgcccccattaccaccaaaatagagattccagcctttttctgtggcaataatccctacatctttcccctgagcttcggagcattcacgggtacaaccagataccccaaatttcattttatgcggcgtgcggatccctttataacgatgttctaaaaagacacctaatccaacactatcgccaaccccaaaacgacaccaactgtttcctacacaagtttttaccatacggatcgctttggcataggcatggcctgtttcaaaacccgcggcaattaatttctgccaaatcgccggtaaatcttgcttctgtgcaccaaacatcgccatacgttgagagcctgtgattttggtgtataaattgtattcttgcgcaatttgtccaatcgcaataatacccgctggcgtaatttcaccgccgggggagcgtggaataatagagtaagtgccatctttttgcagattggcgaggaagttatcattcgtatcttgtaacgcaactaagtcatcacgcaagatatagtcgttccaacacgaagccagcagagagccgacggtcggtttacaaatttcacagccatagccttgaccatgttttttcaatagttcatcaaagcttttcagcccttcaacacgaataagatgataaagctcttggcgagaatagtgaaagtgttcacaaaggtgatggttaacttcaatgccttgttttgtgagttccgcatttaatacttgagtgataagcggaatacatcccccacaccccgttcccgcttttgtttctgctttaatcgccgcaaccgtatgacaacctcgttcaatagcttgaataatgtcgcctttgcttacatcaaaacaggagcaaatttgtgccgtttcaggtaatgaatcaaccccgattgccggtttacttccagcatgagcaggtaagattaatgtgtcaggatgttctggtaattcaattgtatttaatgctaactgtaacagattgccataatcttccgtgtccccaaccaataccgcacctaataggtatttattgtcttcactcactatcaggcgtttataaatctctttaccttcatcaagataaatatagctacgacaacctgcttggcgaccatgagcatcaccaattccccctacatcaaccccgagtagttttaattttgcacttaaatccgccccttggaatgctgtctgttgacctaatagatgatcaacggctacctgagccattttataacctggggcaactaacccaaatgtttggttatgccaagaagcacactccccaatggcataaatatctgcatctgaggtttggcaatagtcattaatcacaattccccctcgtggtgctatatcgagagaacattggcgtgctaatttatctttcggacgtataccggttgaaaatacgacaaaatcaacctcaagtgaggagccatcggcaaactgtaatgttttacgcgcattttcccctgtcgataagatcgcttgggtgtttttcgctgtgtgtactttaacccccatgcgctctattttacgtttgagttgctctcctcccatgctatcaagctgttctgccattagcgttggcgcaaattcaatcacatgggtttcaatacctaaactttttagcgcaccagcggcttctaaacctaacagcccgccgccaataaccgcccctttacggcttaaacgagcacaagcttcaatcgcatttaaatcttcgatagttcggtaaacaaaacaatctggtgagttgtttccattaataggaggaacccatgggtaggagcctgttgccatgatcaatttgtcgtagctaacacaacgcccggtattggtgtgcaccactttttcttcacgattaatggtgatcacacgctcacccactaatacttcaatatgatgtttctcgtaataaccgggtttaactaacgagagctcttcagcggtgtgatgagaaaaataggaagagagatggactctatcatatgcaatacgaggttcttcacaaaagacgataatattgaacgtttcattgccgcccttatcaatcaattcttctatataacggtgtccaaccatgccgttaccgatgattgcgagtgttttcttgctcatttttgcctcagatctaaaggtatctaaggttaaaatacgaggctactcataagagatattgatgaatatcaaatacagcttaatcaattcagccaatacaacttaatagtcaacatattactaccaaagtagtattttattcgtcgtttgttgcgatgaattattcctcaaccataattaattcaaaaggcttataacgaggtgttatatataagtgtaataaaaactttgcgaaatgcgcttattttgcctaagttaatttccaaaagtaataactaataagttattgacataataacgaaagcgagactatttcagggagcgtccaatgaaagtgaaaaccaaattattatcattacttgtgatgggtgctctcagtgcccctgtattggcagcaacacccgccaatacattgattgtagtacaaggccttgatgatattgttagccttgatcctgccgaaagtaacgaattatcaagtattcagaccgtaccaagtttatatcaacgtattgttcagcctaaccgtgacaatccagaaattaacgagccaattttagtcgagagttggcaggctcaccctgaacaaaaatctatcgtctttaaaattaaacaggatgcaaaatttgcctccggtaatagcgtacgcccagaagatattatcttctcttaccagcgtgcagtgacgatgaataaatcccctgcttttattttaaatgtgctaggttggaaagcagataatattaataccctattgaaaaaagtcagtgataaagagattgaagtacgttggacagcagatgttagccctgatgtggtacttaacatcctttctacaccaatcgcttctattgttgatgagaaattgattgccgcacatattaaaaataatgactttggtaataattggctaaaaatgaattcggctggtagtggtgcttataaaatgcgtgcctacaaacctcgccaagccattgtgttagaagctaaccctctttcaccgaccggtgcgcctaagatagccaatattattatcaaaaatgtgcccgatcccgcttcacgccgtctgttaattgaaaaaggcgatgcggatattgcccgtgacttaggtacagaccaaactgcagcattagcaggtaaaccgggcattcaaattttaaatatcccttctgctgagcaagtctatatggcgtttaataccggtagcggaaatccgcttcttagcaatccggcattttggcaagcagcgcgctatttggtcgattataaagggatcaccaatgacttaatgcgtgggcaatattttattcaccaaagtttcttaccggtgggattaccgggggcattagaagataatccatttagttttgatccgcaaaaagcgaaagatatcttagcaaaagcaggaattactcatgcacgttttactctcgatgtagaaaacaaagttccttacatcaccgttgcacaatctattcaagcaagctttgcacaagcgggtgtacaggttgatctgttacctgctgccggtagtcaagtttatagccgagtgagagcaaggcagcaccaagcggcgatccgtttttggatccccgactattttgatgctcactccaatgctagcgcttttgcctataatgacgggcaatcaaataccgtggcttggttaaataattggaatattcctgagttaagtaaacaaacactcgtcgcccttaatgaagcggataaggctaaacgtcagtccctttatactgaaatgcaaaaagagctacaacgcagttcaccttacgtgtttatcgaccaaggcaaaaatcagattgtattacgggataacgtgaaaggttatgctcaaggtctaaatgccgatatggtctattacgacaaagtcactaagtgatcattttcctgccgccactcacaatcatgttattgtgagtggtctattttttgcgatttcaaggctgttgccgtatgaatacactcacgatatccactcgcctaaaaagccagttgtttaccttggttcaaggtatattgacattggcgctaacacttttagggttactggttattacttttacgctttctgcgttttcccctgttgatcctgttttacaaattgttggtgatcacgccagtattgaaacttataatcaagtaaaacatgagttagggttagatttacccatctacatgcaatttttccactatgtagaagcactattgcaaggaaatttaggtacggcgacgtcaacgggtcaaccggtatttgatgatttaatcgccacctttccagccactttggaattagccactgtcgccttagtcattggcgctagtttggggattttatttggtgtgttatgtgcgcgttttgttggcaccccctttgattttaccttacgctttttaacgctattaggtagctcagtccctattttctggttaggtttgatattactccttattttttatgccacattgcaatggacagcaggcccaggacgtttggatgatatttatcaatttaccattgagcctgtaaccggctttgccttgattgacactctactggcaggtgataaagatgcctttctaaacgccctatcacatctcatattaccggtttctctgctagcctattttgcgctggcatctattacccgtttaacacgctctgcctgtttaaatgagatgaataaagagtacgtcactctcgccagagcaaaagggattggcgaattacgtctcttatttacccatgtattacctaatattcgcggtgtgttgatgaccattatcgccttgtcttatacagggatgttagaaggtgccgtattaacagaaacggtattttcttggccggggattggtcgttatctcacaacggctctctttgcgggtgataccaccgcaattatggggggcacacttgttattggtctatgttttgtgctgattaataatatgacagatatcgttattcgtttgactgatccgaggttacgctaatgtcactctcctttttaacaaaaatagcgcgttcaccttcagcgtttatcggtctgtcattgttgcttcttctgctactaattgccatttttgccccttggctagcgccttatgatccaaattggcaacacgctgcacaacgcttattagcccccaatgctgcacactggttaggtactgatagttatggtcgcgatattctttcacgcttaatttatggtacacgcccaatgttaggtttggtgggtcttgttgccttgataacactaccattagggctatttattggcattttatccggttattacggcggttggacagagcggattttaatgcgttttaccgacatcattatgtctatgccctccttaattttagcctttgcctttgtcgccatgttagggccgggattacttaacggtgcattagcccttgcacttacagcatggccggcttatgcccgccaagcccgtagtgaaattcaacacttacgtaatagtgattaccttgcagccgctgaaatgatgggaattaacggtattagactattatgggggcatattcttcctttatgtttaccgtctgccattgtacgtttagcccttaatttagcggtgatcattcttgctgcagcaggtttaggtttccttgggctaggtgctcgccctcccatggcggaatggggagcaatgattgccgaagggatgcccgttatttttgatcagtggtgggtggccgctattccgggtacggcaattttaatcagtagccttgcttttaacttattgggtgatggattacgcgatgtattaggagaaagccatgaataaagcccctttaatcgaagtcgataatctgtgtattgattttccacgtgctagagtggtgaataatgtctcctttcagttaggacaagagcggttagcgctggtgggtgaatctggttcaggaaaatcgatgacggcacgctcattaatgggcttagtgcgtaagccgggcaaagtttctgctgataaattgcattttatgggggacgatctcctcgcttattctcctaagcaatggaaccagttacgaggaaaaacaatatcaatggtattacaagatcctcgttatgcattaaacccagtgaaaaccatttatcagcaagtagaagaaacggtaaaactccatcaaaaattatcccataaagatcaacatgcattaattactgaaactttgctttccgtgggattaccggaacagagtatttctcgctaccccggtgaattatcgggcggtatgggacaacgcgcgatgatcgctattgcgctgattaataacccaacggtactgattgcggatgagccaacttccgcactagatgcacagctacgacatcaaatattagaacttatcattacccaatgcgcacaacgagatatggctttgttgttaattagccatgatctacctttagtggctgaatattgtgatcgtgttatggtcatgtatcaaggggagcaagtggatgaacttgaggcaaaagcattacctcaagccacacatccatacacccgcaccttatggacctgtcgccctaatgcgagtacctatggcacacaattaccggtattagatagaacactgaattttaaaggtacaccttatgctaattgatattcatcatttacgcgttcaatttgaacaaaatagacagattaagcaggtggtaaaaggtgtcaatctacaagttaaacaaggcgaaacctttagtttaattggtcgttctggttgcggtaaatcaactgtattacgggttatagccggattattacatcattggcaaggggatattaagttgttagggcaagcaattaagccacagcaacgctttcaaggtaagttacgccgtaacatacagatggtgtttcaagatccctatgcttcattacaccctcaacatcggatagaacgagcatttattgagccgttaaaaattcatcatattgcttatgataaaacaacaataacctcagcgttagagcaagtcggtttagaaggcgatattgcttatcgttatccacatcaactatcaggtggacaacgtcaacgtgtggctatagccagagcattactgttgcaaccacagttgttattattagatgagccaacctctgcactggatatgtcggtacaagcagaaattttaaatctgcttaataccttaaaaaaacagcataacatgacttaccttttggtcagccatgatgcagatgttattgcacatatgtcggatagcgcagcgctaatggaagagggtcaattgacttgctattatgatagaaaagcgctttctcaagggcttcatcgtcttgattaattaaaaatagccacaaaaaagataacaaagagagaaatgataagagcagtattaaatatcaatactgctctattggtaatattacactgtgcttatactaataatcccggaaaaatagaacgtaacccagtgacaataaattcaatacctaacgacatcaacaataaccccataatacgcgtgacaacgttgataccggtttgacctaagtatttaactaataaagtggcactacgaaacagtaaccaacaacaaaaagcaaaaaagatactggtcgcagcaagacctaagaaattagtcaccccttcccaacgtgaactccaaacaatacaggagctaattgcgccaggacctgccatcaatggcaatgctaaaggcaccaccgcaacactgctacgtactgctgattcatttttttcttggttattttgtttatcttctcctaagcgcccatttatcatggtcattgcgattgtcactatcagcatccccccagcgatacgaaatgagtcaatagagatgccaaaaatactcagtatcgaatcacctattaatagggaaataaccaaaataatcgcaacggagccattggcaattaagtttgttttattacgtcctgcatccgtttgataactcgtcatactgataaatacaggcaagatccctatcgggtttacaatagcaaaaagaccgacaaaaaatttaatataaccggataaatccagcagtgcccccatgaaaagccccttcttggctaataaacatgcgaattatgctctaaaagatagagtaactccaaaaaatgcgcgttactttaaatcaataaaccagttaattctattacttaacattattttggctaaatttttcgctagtaaacaaccataactccagtgatttaattttatatcctagagagtcttacaacaaaaaaatagtccatttatttttgtaattaattatcattaccatttaaacacttgctgaaaggtgtcagcttgctattattgtgatgtagatcactttaattaattagaaagatgataagctgtcatcattcagaaaaaggagatctttttaaaatatatttgtatttgttattgttttttcttagctttttaagcaaattagagcttctaataataatgacttaaataagtatagaaattttgatttgagctattcttatttagtgatgattttaccggctaatttgcttaaaaagtttaacattttatcaggagtctctttatgtctgtaactaacgttactgaactcaatgatctggttgctcgtgtaaaaaaagctcagcttgaatttgctaacttttctcaagaaaaagttgacgcaatttttcgtgctgctgcattagctgccgctgacgcccgtattcctcttgcaaaattagctgttgaagagtctggcatgggtatcgttgaagataaagtgatcaaaaaccactttgcttcagaatatatctacaatgcgtataaggacgaaaaaacctgcggtattttgtctgaagatttaacctacggtactatcactattgctgaacctatcggtattatctgtggtatcgtgccaacaactaaccctacttctaccgctatttttaaagcattaatcagcttaaaaacacgcaacggtattattttctctcctcatccacgggcgaaattagccacaaaccgtgcggctgaaattgtgttaaacgctgcaatcgccgcgggtgcaccaaaagatattatcggctggatcgatgaaccttcagtggcattatccaatgcattaatgcaccatgatgatattaacctgatcttagcaacaggtggcccaggaatggtaaaagccgcttacagttcaggtaaacctgctatcggtgttggtgcgggtaatactcctgttgttattgatgactcagcagacattaaacgtgcagttgcttctattttgatgtcaaaaacctttgataatggggttatttgtgcttcagagcaatctgttatcgtcgtagacagtatctataaacaagttcgtgaacgtttcgccactcacggcggctacatgttaaccggtaaagagttaaaagctgttcaagatattatcttaaaagatggtaacttgaatgcggccatcgttggtcaaccggcagtgaaaatcgcagaaatggccggtattgaagtgcctgttaacactaagattttaattggtgaagttaaagaaactactgatgcagaaccttttgctcacgaaaaactatcgcctctgttagcaatgtaccatgcacaaaactttgaagatgcggtacataaagcagaaaaattagttgaaatgggcggtattggtcatacttcttgtttatataccgatcaagacaactgtcctgaacatgttgcctactttggcgacaaaatgaaaacgtcccgtattttaatcaatacaccggcatcacaagggggtattggtgacttatacaactttaaactcgctccttctctcactttaggctgtggctcatggggtggtaactccatttctgagaacgtagggccaaaacaccttatcaacactaaaaccgtggcgaaaagagcagaaaatatgttgtggcacaaacttcctaaatcaatttatttccgccgtggttgcttacctattgcactggaagagattgcaactgatggtaaaaaacgcgcatttatcgttacagacagtttcttattcaacaacggttacgttgatgaagtgaccaatgtactgaaaaaatttggtgttgaaacggaagttttctttgaagttgaagcagatcccacattaagtgtcgtacgcaaaggtgcagagcagatgaacagctttaaacctgatgtgatcatcgcattaggtggcggttcaccaatggatgcggctaagattatgtgggtaatgtatgaacacccagaaacacacttcgaagaattagcattacgctttatggatatccgtaaacgtatttataaattcccgaaaatgggtgtgaaggctcaaatggtagcaattaccacaacatcaggtacaggctctgaagttacaccatttgctgttgtgactgatgatgaaacaggccaaaaatatccattagcagactacgcattaacgccagatatggcgattgtagatgccaatctggtgatgaatatgccaaaatcactctgtgcttttggtggtttagatgcggtgactcacgcattagaagcttatgtttctgtattagccaatgagtattctgatggtcaggcactgcaagctctgaaattgctgaaagaatatctgccagcaagctatcatgaaggtgctaaaaatccggttgctcgtgagcgtgtccacaatgcagccaccatcgcaggtattgcatttgctaacgccttcttaggggtttgtcactcaatggcgcataaattaggctctgaattccatattcctcatggtcttgccaatgcgttattaatttctaacgttattcgttataacgcgaatgataacccaacaaaacagactgcatttagccaatatgaccgtccacaagcacgtcgtcgttatgctgaaattgctgatcacttagaactgtctgctcctggtgatcgcacagccgctaagattgaaaaactgttagcttggttagaagagatgaaatcttcattaggtatccctgcttctatccgtgaggcgggcgtacaagaaagtgatttcttagcgaaagtggataaattatcagaagatgcgtttgatgatcagtgtaccggtgctaacccacgttatccgctgatctctgagttaaaacaactgttattagattcttactacggtcgcgaatttaacgagcaccctgttgctgaggtaaaagaagcgaagcctgcgaaaaaaagcagtaagaaataatagcgctatctctgtattaacagattagccttcaatcttcgatgattgctttactataaaaccagccacaaggctggttttattttgtctatcaatggataacaataatgttctaatccccttatctctcaatttatttttcttccttgtatttaatatgacgtccagcaagatagatgagagagccgccttgtgattatcacttttaggtatacgttgctaaaacagcaccaatcgccctctccctcatttttatcaacatccatctctttattcagcttaaccgtgattaagcgcttaacgtgctttacagcgccttgatatctgattacctagaaatgaaaacgctaaaatttctcattgagttaaaccacacgacacaattattcttatgataaggtttatcacacaaaaatgagagttgagcaaaagtaggcactattaatgtaataaaatgaggtgcttattttttaataagcactttttaccgcaacaccataaaaaagagaaatatcaaaagattttgatctatcgaagaaaggaataaacttataaaaataaaatttcaataaaatattatcgaactcacttttgcttattaagcagtatataacattcaaagtaggggctatttgtatattttttatctaataaatactactttagtggtaattcacatgtttatatttggtctattaagcacagtttcctcttttttactcataaccaatatgaatatttagatataaacatttcacctgagccattaaatggttgaaatattttttcactcacaagcattttttctcttctttattcagttttattaaactataaataatggcgaagtatcaaatgtcatcatcttagaacatttgtaaaaatcaatatctacatcacaaaacaaagaacctacgtatatctgattacctttttattgattaaagataatgaaacggagaaaacgaataaatgtttctagaaaaaaactaacatttttttacattattgatgctattttcagttatgaattataaaatacagtaaatataaaacgtaacttctaaaaatagataacctttttttagtataacaagagataacatttatttagacgattatatttccccccctctattcccgcaccaattaacaatagagaagaggaattttgcattataactgttcaattcgtccttttaacgtagcctctgtataatgtttgcggcacactgaaacatatttttcattaccacctatttccacttgtgcgccgtctgaaagtactttcccatttgccgctaagcgtaatactttatttgctttacgcccgcagtaacaaactgttttaagctcaacgagcttgtcagcccatgcaagcaaataagcactaccagtaaataattcacctctaaaatccgttcttaagccataggttaaaacgggtatatcataactatcggtaatttcacaaagttgctctacatgtgctttagtcaaaaattggcattcatcaatcaaaacacaatgaataggctctttattattttcagctaaaatagcatcacgaatattcatatcatcactgaaaagcaatgcatcagcacttaaccctatccttgaggttacttttcccttggcaaaacgtgtgtctatcgctgccgtaaaaatcaaagttcgcattcctcgctcattatagttataagaagactgcaataaagatgttgattttccggcattcatagctgaataataaaagtaaagctgagccatcagctctctccttaaatagtgtgtattatcgcgggaagcagtttaacataaacaaacgagaagttatcaacgacaactatttatagcctttatttctataaaagatatagcgaaaaaagcgcaggatcactgatgaggcaaattttttgtttaaaaaataaatagccttaataggtacttaacatattaaccccgcctttgatatacagttattaaactatgaaagttactctaagcgcatttttagaaaaaaatccgttattataaaaaagtagacaacgttttctattcttttacattagcgctatcaccagttaaaagatgtatatcattactaatatttcctttattggcgaaagatgccccaacttttaatatttttttgtaaagatattcgttttaaaaaaagaaaatttacgtttggtttgtatttagctattgcagaattttaaatagcaatctattattagtattacatcagccaacaacatttatttgagaccaggaaaatgagcgaatctttaaaaatattaaataacatccgtactcttcgtgcacaggcaagagaaacttctttagaaactttagaagaaatgcttgagaaacttgaagtcgttgttaatgaacgccgcgaagaagaacaagcaatgcaagctgaaattgaagaacgtcagcaaaaattacaaaaataccgtgagctattaattgccgatggtattgatccaactgacctgcttgaagctgctggcgcaagcaaaactggtcgtgctaaacgtgcagcacgtcctgctaaatattcatacgttgatgataatggtgaaactaaaacttggacaggccaaggccgtacaccagctgtaatcaaacgtgcaattgaagaagaaggcaaatctttagaagatttcctcatctaatttaatgcatactctatttaaaatacccttttaaaaattaaaagggtatttttcttgtttagtcatttttattaaacgagcgtttaactttaataggctgatgaagcttttaaataaaaagggctttacaaatatagtgaatgtattgataaaattaattagttaattttataataaaaaaggagctttaaggctcctttttgtcttgtgcattatatctatgctctgattattgctggtaataatctacataccaatccacaaactgcttcacaccatactctactgcagtgttgggtgaaaaacctgttgtctgagctaaatcgctacaatcagcacaggttgaaagtacatcaccatcttgcatcggcattaagttcaatttagctttaatattgagtgatttttctattgctgtaataaaatccattaactttgtaggctgtccattacccacattatatattttataaggtgcagaacttgatgaagtttccccctgctctacggtccaatttgggttgggttgaggaataatattaattaaacgtaccacagaactgacaatatcatcgacataagtgaaatcacgggtcatatttccgccattataaacatcgataggctcacccgctaacatagctttagtaaatttaaatagtgccatatcaggacgcccccaaggaccatatacggtaaaaaatcgcagtcctgttgtgggtagctgatataaatgagaatagctatgagacattaattcgttggcttttttcgtcgcagcataaagtgacaccggatgatcaacactatcttctgtagagaaaggttgcttttgatttaaaccatataccgagcttgatgacgaataaatcaaatgcccaacgttatgatggcgacaaccttctaatatattaatatggcctacaatattagcatcgatatatgccattgggttttcaattgaataacgaacgccaggctgagccgccaagtgaataactcgatcaaaacggtgatcagcaaataattgcgcaatactcactgaatctgtaatatcaattttatcaaattggaagttatccaactgattaagtttagctaatcgtgcttcttttaagcgcacatcataataatcattgagattatctatcccgacaacatgataacccatttctatcaaacgctggcttaaatggtagccaataaatcctgctgcacctgttactaatattttcatattatactcaaataacccaattaattgatttctgcgctaaacgctatcatgcttaatatcacctcaattaacatcataacgcttaacctagtcaatgccgatatatatatcaatattagcactgtaatttatcatcttttatagcggtacttttaagctttaagccataaataaatgccgcaccacattataaaattaaaatgacagtgcgacactattaacaagataaatcgttaaattttgttactcaacacattaagcttgcagtgattttatccatttcgtgaactcttcgccaaactcttcgtgctgtaaaccatattcaacaaaagctttcatataacctaatttattaccacaatcgtggcttttcccttgtaggtgataagcttctacaggctctttttcaattaacattgcaatcgcgtcagttaattgaatttcatcccctgctcctggtgccgttttggctaataaaggccaaatgttttcagacaacacataacgaccaacaatagataaatttgaaggtgcttcttctttcttcggtttttctaccacacgagtaatgggtttactgtcgccaggctgtaaatgttctcccatgcagtcaacaatcccgtagttagatacttcctcttcaggaacaggctctactaaaatttgacttgcgccagattgttcaaaatgagaaagcatctcttttaaattaaccttagtcagatcagcactatatcggtctaaaataacatccggcaagataacagcgaaaggctcatcacccaccaaaggttttgcacataaaatggcatggcctaacccttttgctattccttggcgagtttgcataatagtaacgtgacttggacaaataccttgtacttcttccaacaactgacgtttaactcgtttttctaaaatagcttctaattcaaaactggtatcaaaatggttttcaatagaattttttgaagagtgtgtaactagcacaatttcattgatgccagctgcaatacattcattaacaacatattgaattaaaggtttatcaacaacaggtagcatctcttttgggatagccttggtggcaggcaacattcttgttcctagccctgcaacagggatcaccgcttttcttactttacgcaccactgatgacattactcttctcctacaaattaagtaccatgatattcctatgatgttatggtacatataaaaaaataatcgccagagtataccagctaatatctacggataaacagagcatcatcgcttaattgagattgttcttcatttatgtttaatatatgtgcaataacagattttatttaatctaaatttaacgtttatgtataggtgagaacattaaattaattttatggtgctgattccaaattttacattgccaatctattcccacacactttatttggttaatatataaagagtgtagtgttcctaaaggtataccactatttaaaacatattttttattctctgtttttatttcagctcgtagtcctgctgacgctaataatatatttttttccttggtgtggtaataacctaaaatcagcgggaatgatcctctcacccccatatcctcaagcattttattgattttattcaatatgttatacatactaggtaagaagcgtcttttctcagtagcttttaggaaacgattaaaaaccacccttaaaagcagcgcaacgagtaacccattttcttcatcattagagacgtcaacacagtaaaaaatgatttgatcttttgataaagtcgctatatcaaataacaaccccatttgggatgcatcatttaattgacgataattaacattatatcctgcgacaatttgtttaacttgcggttgcatctgtttaacaaaggattgaatataatgaggctgttctcgtaagttattccaaagaggtccaagttgtccccttgcaattaattcagactcaaaaaaacctggacataatacttcaatgaccttctgttttaacttagctaaattagttacgggcttaagaaaaacgtcctgagcgccaaagcgcaacatatcatcaatttcagccatgttgtcagtacatgaaatagcaataacagggaaagaccaatgacgctgctctagatgacataaaaaagtcggcccattcataacaggcattctgatatcacataaaataagatcaggtcttagtccctcttcaagtaacaacaatgcttggctaccattgtcagtcgcataaacgcaagccttttcgtgtgaaaaatactcagtgagcattgtgcgaaatacaacctcatcatcaataatgagaatttttttaccgactaaggctttattcattagtaatacccataactatcatttcacttgcggtttatttagcgttacattattagtttagttcaacattgacgtttattattcctaatcgctatttttctgatggggatcgtcgtataaaaatggatcaggacattaccttgtcaaatttatgcccctgcaatagccaattgccttatagtgagtgctgtgagccttacttattagggacaaaaaatgcccctacagctcaagcgttaatgcgctctcgctatagtgcttttgtgactcataatgcagatcacctaatcaaaacatggcacccttcgtgtcgtacaccttctttacgggatgagttaatcgccacgtttcccaatacacaatggctagggttacatattatatcggcacaagaaaaccctcgtgataacgaagcctttgttgaattctcagcttgctttattgaaataaatgctgatgataagcagtatctacatgaacgctctcgttttctaaaaatagacgactgctggttttatattgatggtgtacagcctaaagtaggacgaaacgatccctgtccttgtggctcaggccgtaaatacaaaaaatgttgtgaacacaacagaaaataattgcaaacacagaagtaaattaaaggatttatccatacatgcaacaccaaaatactcaaaagaaaatactacgtactatttgtccagatgcgaaagggcttatcgcaaaaattactaatatttgttataaacatcagctcaatattgttcaaaataatgagtttgttgatcatcgcactggacgcttttttatgcgcactgagctagaaggtatttttaatgatgaaacctttttagccgatttagatgatgcacttccacaaggctcacagcgagagcttaatactgccggtcgccgccgtatcgtcattatggtcactaaagaagcccattgtattggtgacctcttaatgaaaagcgcttttggtgatctggatgttgaaattgcagcagttattggtaatcacgacacgctaaaacaccttgttgagcaatttgggatccctttccatctcattagtcatgaagggttaacccgtgatcagcatgatgaaaaactgatagcacaaattgaccaatacaaacctgattatgtggtattagctaaatatatgcgtgtattaacccccgcatttgtacaacattacccaaatcaaattattaatattcatcactctttcttaccggcatttattggcgcccgcccatatcatcaagcctatgaacgtggtgtaaaaattattggcgccacagctcactatgtaaatgataatttagatgaaggccctattattactcaaaatgtaataaacgtagaccacactttttcagcagaagatatgatgcgcgcaggacgggatgtagaaaaaaacgtactaagccacgccctctattgggtgctctcgcaacgtgtttttgtctatggcaacagaacaattattttgtaggcttacccgttttaaattagtgtaactacgacacaagcctaaagtaacaagagcctgggatagttattttatcacaggctctttttattttttgttacacatccaagtcaatcactatagctttctatctaaaatcaatacgatatagcacaacagttaagcaaagcggatatttttaaagcagttgatcgctttttcttaaaatagcactttacacatctcaggtatttggtattattgcgcccgctgtcacggacagcaagacaatttaatgttggtgggatacccaagcggccaaagggagcagactgtaaatctgccgtcacagacttcgaaggttcgaatccttctcccaccaccatcttcaatactcttcactattttttcattccaattcttttattaaatcaacaaacctgttcaatatactcgagtgatatttagatttatagatataacaattataaatcagctccgtttgtgttaaaggtataaagcacagttgcttttcatcctcacttttaatcgggttttcatcagtaaataatagcgaatggtgagtttgaataaagtttaaacaacaatttaaatcatccatcaatctaatactgacaggtttaccctgatccgctatttcattttctaatttctttatttttgctgttttatataaagcgggatcacataaccaaatattttcttttagcaatgtattgatattctcttgtgctttttgtgctaagatttgttggcaacatattcctagatatttatttttaacttgatgtattaagctaaacttttcactaataattttatctgagcttaagattaacgtgtttccatcataatctggtatctcttcaaaattatctttcgaaaatctcatcatatttatatgtgaacaattcttattggctgcttgatagagtgctgttaaatattgacttttaccccaatcataataaacatgaatgctattattaataatgcccgatgtgtgtttttttgttatctctttttcttgcagataaagtgattttaaatcattatagagttctaacccttcttgcgttaaactcataccaaacttttcccgcttaaacaagcgcttccctagcacggcttcaaaatctttgattgatttcgctacaggtggtgtcgttcggttcatcacacgagcagctttacttaaggatccattttcaacgacggccataaaggcctctaatttacgagaaaaaaacataatccaccattcctttgctgtgttaaacaaaacaattaaattaattttattaatataaataaaacacatattaactgaaagaaatccatgcgaaataaatattatttttaattatctttacctcctataaatataatttataattcaattgatatttttattctgtcattttgctttacatataaaaaatgataatacttatattcttctatcaaagaatagtttatgtttctactttatttaattaatattttttgttaggcataaacttattaatattattagttgccatacattttgctatttggctacgatttatctatatcacgcgattatatctcgatgacaggtattaacattggcatgtaaccgacttacatttatttcattatcctgttagtataagttatcctattattcaatctataaatggttatagtcacatgaaatttgtctcattcaatattaatggattacgtgctcgccctcatcagctcgaagccattgtagaaaaacaccaacccgatgttattggactgcaagaaacaaaagttcatgatgatatgtttccattagaaactgtcagtgccttgggctaccacgttttttatcatggacagaaaggccattatggtgtggctttgttaactaaggcgaaacctgtcgcggtacgtaaaggattccctggtgatggtgaagaagctcagcgtcgtatgatcatggcggacattgaaacccccgctggattattaacggtaatgaatggttatttccctcaaggtgaaagtcgtgatcatgagacaaaattccctgctaaagcaaaattctatgctgatctacagcagtatctgaccaccagcttaacgccttcctctcccgtactgattatgggggatttaaatattagcccaaccgataaagatatcggtatcggcgaaaataatatgaaacgttggctaaaaatgggtaaatgttcatttttaccggaagagcgagagtggttagcaacgcttatgggttggggattaaccgatacttaccgcgcccaacatcctgaagtcgaagaccaattttcttggtttgattatcgctcaaaaggctttgatgataaccgaggcttacgtatcgatttactgctagcaagtcgttgcttagcagataattgtatttcaaccggcattgactacgatattcgtgcgatggaaaaaccttccgatcacgcacctgtttgggccgagtttaagctttaattccctctccccccttattgataaaccccactttaaatagattaaaagtggggtttatttatatattagttagcgtcttacacaatcaactaagcatcactctttatattgcgattcgtagattgagactgcgctgaacgacttttcccttgtgcactttttttcgtcgcacctttacgttttttattctgcgcaggcgcaggcaggtttctaaacgcttgaatattaggacgacgtttagcttgagtaattaattcaaatagtgtgttacttaatggcatcataaaatcttgatacttaaattgcttctcactaatttgcgttaatattgattcccaatgagcggtcatatcgggtaatgtcgccatatctggcaaaacatgaattaatgctcttcctgctggtgtcgagttgatagctcgccctttcttttgcagaaagccgcgtttaaacagtaattcaataataccagccctagtcgcttcagtacctagcccatccgtcgctcttaggattttctttagctctttgtcttgcacaaaacgtgcaataccggtcatagccgaaagtagcgtagcatctgtaaaaggtcttggtggttgggtctgcttggcaacaatttcgcctttttcacaaagtaactcatcacctttagccacaataggtaaggcgctaccatcattttccgcatcttgctctttactacctaataaggtacgccagccggcttgtgctaaaaatcgtgccttagcaataaactttccattctcaatatcgagttcaatcacacatttgcggtacaccgcatctggcataaattgcattagatattgtcgggcaatcaaatagtaaatattcttttcattttcacttaatgaaatattacctgttttcgcagtaggaataatggcatggtgcgcatctactttcttgtcatcccagcaacggttctttttatcaatatctaatgtttcttgtggtaaaagactattatcatgcacactaatggcattcatcaccgcatgacgcccagcaaagtgttcatcagggagatagcgactatcggagcgtggataagtaataagtttatgcgtttcatataagcgttgacatgtgtctaacacttgttgagcgcttaaaccaaagcgtttcgccgcttcaatttgtaaagcagataatgaaaaaggcaaaggtgctatttcagactcttgtttatcttgataatcggtaacattagcaggcttgccagctattctatcaacaacatgctctgctaatttgcgatgtaataaacgcccttcttcatcttgccaaggctcgcagtgttcactcggctgccaaatagcggtaaatcgctcatctgcaggagtaacgatatgcgctttgacttcaaaaaaatctttcggtacaaagttttcaatttcttcatcacggcgtacgactaaacctagcaccggggtttgtactcgcccaacagagagtacgccttggtaaccattgcgctgtcctaataacgtgtaagcgcgtgtcatgttaatgccatatagccaatccgccctcgctcttgctaaggcagaaacacataatggaataaattcatgattgtagcggagcttatcaattgctcgagataccgcggcggggtttaaatcgttaatcaggcagcggcgtgcctgtttcctttgagcatcactaatattaaggtaattaagtacttcatctactaacagttgcccttcgcgatcggggtctcctgcgtggatcacttcatcggcttgttttagtaatgtgttgatcgtatctagctgttttttcacatcagcgcgcggtttgagttgccatttattcggaataatgggcaaatcatctaacgaccaacgcgcatagcgcggatcatatgcatccggctcagcctgctcaagtaaatgaccaacacaccacgtcacatactggttatcaccacaaacaataaaaccatcaccacgtttatgcggttttggtaatacatcagcaatagctcgagcaaggctgggtttttctgcaataaataatctcattacgttagtttgtcacttcaattaacgctcttcctgctttcggctctgttaattcaccgatcgaggtcaaatcaatattaaagcgtttagcaacttcttttacttgctcaacggcttctggctgtactgccagtaataagccacctgaagtttgcggatcacataataatttacgttgcatttcgctgatattaccaatcaaatggccataactttcaaaattacgtccagtaccgcccggtacacatccttgctctatatacgcttctacttcaggtaatcgtggtacttgtgaaaagtgaatagtggcttgtaatccagagccttcacaaatctcgctaaggtgacctaatagaccaaaacctgtcacatcggtcattgccgtgaccccttcaatatcagaaaaatcagtacccgctttattcatacggcacataatttcagtagctaggccctgatgctcaggttttaataagccttttttctctgcggtagttaataccccaatacctaaaggtttagttaaaaaaagttggcatcctgctttagctgcactgtttttcttaattttactcaccggtacaacgcccgttaccgctaaaccaaaaataggttcaggagcatcaatcgaatgcccaccagcaagggaaatccccgcttcttgacaggcggctcgcccaccttcgataacttcacgagcaatttcaggcgcaagtttatcaattggccaacctaaaattgctattgccataataggtttaccccccatagcgaaaatatcactaatcgcattagtcgccgcaatacgcccaaagtcataggggttatcaacaattggcataaaaaaatcagtggtactgataattccagtgccattacctaaatcataaacagcggcatcatctttcgtttcattaccaaccaataaatggggatcgtgaaacttagcctgttcactatgtaaaatcgtttccaaaacttttggtgaaattttgcagccacatccggcaccatgactgtattgtgttaaacgaattgcttcagacataacatgtcatccttttaaaaataagtcacaaaatcagttaaatcagcaggagaaaccgttgtaggtgctttcaatgcgggagtaccaagatataagaaaccaacaatatggtcgtgttcaccacaacctaatcccgctcttaccactggatcatgagtccaagagcctgaacgccaaataccactataaccttgtgccactgcagccatttgcatcgcctgaacacaacagcctgccgcaacaatttgctcccattcaggaactttaggatgcgctttaactttggcaatcacggtaataattaaaggtgcacgaaaaggtgcgttttttgctttttcttctacctcagcacctagttgactcaccaccgccgctttatgtaataattgactaaaacgctcaataccatcctctttcatcacgacaaagtgccaaggtttaagggcgccatgatcgggggctctcatacctgcttgtaaaatagcttcaagctgttggttatttggggctggagtagtcagtcgagacgctgaacgtcgatttaaaagcagtgttaatgcatccatttttgtattctcctgtcagtattattgtagcaaaatcccttaagagcagggatagacagttgttatcaattcgcagtataataaaatgttatattaccaccaccgagaaatttaagcggatatttttagctaaaataggattgtacttaagccaatattgagcgtttgttcaaaatatgaatgttttagcttttaggtgtaatacactgcccaagcgcaataaaatacgtgacagactttcgctagtcgctatattagaatggtgtttaaatatttgcagtctaagtagtcaatcgagttttgttattaaaggatcgaagtgagatgtagggaatattagcgttttttattctaaaaatagccgtgacctttgctgtctattgttcacctgcaaggcatactctcatgtaaataaggtatgttgtggctatacagctaatttcttgagtcgctcaatattgaaataaatactttaataatagaaacttaaacctttaccatcaattctagcataactgtttaggattaatttttagctttacatgatgtggagataatatgagtaaaattatggagttaatcggcactatttttcgatttagttggcaggcgattaactttatcaggaaactaatcttaaacgttattttcttctttctactttttatgggtgtaggactctatttcatcgtccaagaaacgcaaaaacctaccgattaccaaggtgcattactggttgatttaaaaggcgttattgttgaccaaacagctaaccaaaatcctttagggcaaatgagccgagagcttttgggtgtttcgggtagccagttacaagaaaattcgttattcgaagtcgttgataccttacgcaaagcagcgactgaccccaaaattaaaggaatggtactaaaacttgacgaatttgctggggcagaccaaccttcactcaattatgttggtaaagcgctgactgaatttaaaaaaacaggcaaacctatctatgcgattagtggttattatagccaaccgcaatattacttagcctcttatgcagataaaatttatttagcatcacaaggtgctgtgggtatttatggtttaggttttagtaatctctattacaaatcgctattagaaaaacttaaagttaatacccatatattccgtgtaggaacctataaatcagctgttgaaccgctgatgcgcgataatatgtctgatgaagctcgagccgcatcgaatcgattagtttccgtactctggtctaattatttaacgcaagttgcagaaaatcgtagtattaccaaggaagatgttttccctggtgcaaaagagatgattgtcgagttgcgtaaagccgatggcgataatgctacttatgcacttaatcgcaaactggtcgatactgttagctcttatgcccaatttgaagcggatatgaaagagacctttcaatgggatcatgaagctaagcagtttaataatatcagtatttatgattatgccgataacctcaccgcattcgccccagaaaacgaagacggcaatattgcggttgtggtcgttcaaggcgcaattattgatggtgaaagcattcctggctctgcaggtggttcaaccattgctaatcaaatccgtcaagcgcgtttaaatcctaatattagagcattagtattacgagttaatagccccggtggtagtgtatctgcatctgagcagatccgcagtgaaatagccgcctttaaacaagagaaaaaacatgtcgtggtttcaatgggcggaatggctgcatcagggggatattggatctctacacctgcgagtaaaattatcgctagcccttcaacattaacaggctctattggtatatttggtgtcatcaatacctttgaaaatagcttagaatcaataggtgtgcatagtgatggcgtgagtacatcgcctcttgcaggactttcggtaaccaataaattaccagaagatttttcagagctattccaacttaatattgaaagtggctataaaacattcctgaaattagtagctgaatcacgtaataaaacaccggcacaagttgatcgtattgcgcaaggtcgtgtttgggttggtgttgatgctaaacaagtaggattagttgatgaatttggtgatttcgatgatgctattaatgcagcagcaaccatggcaaaaatcaaacaaccagtcattgattggatgaaaccggaattaagcttatcagagcaaatattaatgagcttatcggccaatgcaaaagccattattcctgatccattacaagcctatttacctgcaccggtatttaaagaagttaaaacacaaactgagttttatcgtaatatgaacgatccgcaaaaccgctatgcgtattgtttatcttgtggtgatattcaataaataagtgtgctcccgctcaatatgagcgggattatcttagcctttgattattttttagttattttgctaaatggtgtaaataatgatttaaaacatcaattgctgtatttcaattgtgctttttgtctcccctttctttttttattctgcaaaccccctataatcaactctttcttatcgcttaattcataagagtgttaggtctgatgcaaaaaaaatccatttacgttgtgtatactggtggaactatcggtatgcaacattctgatcacggctatatacctgtatcaggacatttacaacgccaattagctaagatgcccgaattccatcgtgaagagatgcccaatttcacaatcaaagagcaccttcctttaattgattcatcaaatattacccctgaagattggcaatctatcgctgatgatattagcgagaattattgccactatgatggttttgtcatcttgcatggtaccgataccatggcatttaccgcttctgcactttcctttatgtttgaggggctggcaaaaccggttatcgtcaccggctctcaaattccattagaagctttacgctcagatggacaaactaacctattaaatgctctctatattgctgcacatcatccgattaatgaagttgcactgtttttcaacaatactctgtatcgtggtaatcgtgcgataaaagcacatgcagatggcttcaatgcttttgcttctcctaatagtgcacctttattagaagcaggcattaatattaaaacgtttaaaataaacccattacctaagccaaaaggtgagtttattgctcatcatattacccctcaaccaattggtgtggtaacaatatatccgggactttctgatgaggtggtgaaaaatatcttaatgcaacccgttaaggcacttattttgcgatcttatggtgtgggtaatgctccttctcatcctgccttgttatcaacgctacgcgaagcaactgagcgcggtattgtcgttgttaacctaacacaatgtatttctggtcgtgtcaatatgggaggctatgcaacaggacaagcacttgccgatgttggggtgatcagtggttatgatatgacttttgaagcagcgttaactaaactccactatctacttagtcagcaatatagctatactgagatctgccgtttaatgcaacaaaacctccgtggtgaaatgacattaaacgatgacgactaggtctaatcaaaggtaactcctgtgaaaaattcagcgttattattagttgatctacaaaatgatttctgtaccggtggcgcattggctgttaaggaaagtgataccgtcatagatacggcaaatcgacttattgattattttcaacgccatcagcgtcctattattgcgagtaaagattggcatcccgcagatcatctcagctttgcaaaaaattcaggtactgttgttggcgaaattggccaattaaatggccgcccacaagtttggtggccagtgcattgtgtacaaaatagccatggcgctgattttcatccattattaacagatgatttaattagtcatattatttataaaggccaaaatcgacttatcgatagttatagtgctttttttgataatgaccatgaatatcaaacaggattgcatactcttttacaaagcatgcagatcgagcatctcaccattctagggatagcaactgattattgcgttaaatttaccgtgttagatgcattacaattgggttatcaagtatcagtggttatggatggttgtcgaggtgtcaatattcaaccagatgatagccaactcgcatttaatcaaatgcaacaacatggggcagttttagttgattcagtaacaatgcttaaaagtgacaaataatataaacaacatgattagcaattatcattctctacttgtatgaatagtagaactaaaaagtggtgatttatccaaataataaactaataaatcaccaccgttacgctaactttcattatttaaatttaaaaacgtcttaatcatcatccattggtgttaatgtggctaaacgttcagcttgaaattgcgcttttagctcttgtttgcttttcatcgtaatttgtccgtttgtgccaaccgtcatatgttccggattatggttattctgcgcttgccataagagaacaatttgcatgcaatgctctttttgctctgccgtgagtgcaacgccgtctggccatttacctagctcaactgcggtagaaagacgttgataaatctcaggtgtgaccattgaaattaaatcattaacttccattgattgctccatatatcaaattaccacgcaaaagctgaatcgtttttttatttgttaatttattgttaatagcgactatttagcccttttgcacttcacctgtttctgtattgctaaatgccaaagaggcagaattaacacaataacgttgtcctgtcggtgctgggccatcattaaatacatgccctaaatgagcaccacattgatgacagcggatctctgttcttttcatattatgcgaaaaatcatcaagataaagaattgcatcatcacttacaggttgataaaaacttggccagccacatcctgcatcaaatttagtttccgaataaaacaaaggcgcagaacaacataagcaatgataaatacctgtttctctattatgtaataatttaccactaaacggcggttcagtaccccgctgttgcgtcacataatgctgcatttcattgaggtttgataaatcaatgtgattgttatcacttgaaatatgcacttttttttcattattgctcataaacacctcacactgacaaaaatgttttttaaaacaacagcaaataataacaaagatttaacaacaaatctggaaaatatagtctaaaatcaatgagagtaatctttagtttttgaaatgtgatacatttcacataacggagcaaaggtaacttcatttatcggcaatgatcccgataatacacagcgtaatatttatctaaaacgaccaatccttaagcaaaaagtgtttttttaattgattttttgcaattattgacacgattccgcttgacgactggcgcggttttggtaactttagaagcaactttttaattcactaataaagctggtggaatacatatgactatcaaagtaggtattaatggttttggtcgtatcggccgcatcgttttccgtgctgcacaagaacgttcagatatcgaaatcgtaggtattaacgatctgttagacgcagaatacatggcatacatgctgaaatacgattcaactcatggtcgtttcaacggtactgttgaagtaaaagatggccacctcgttgttaatggtaaaaccatccgcgtaacatcagaaagagatccagcaaacctgaaatggaacgaaattggtgttgatgttgttgctgaagcaactggtctgttcttaactgacgaaactgcacgtaaacacatccaagctggtgcgaaaaaagttgttctgactggtccttcaaaagacagcacacctatgttcgttatgggtgtaaaccacaaatcatatgcaggtcaagatatcgtttctaacgcatcttgtacaactaactgcttagcgcctttagcaaaagttatcaacgacaaattcggtatcgttgaaggtctgatgacaactgttcacgcaacaactgcaactcaacgtactgttgatggtccttcaatgaaagactggcgtggtggtcgtggtgcttctcaaaacatcatcccttcatcaactggtgctgctaaagcagtaggtaaagttattcctgaactgaatggcaaactgactggtatgtctttccgtgttcctactcctaacgtttctgttgttgacttaactgcacgtctggaaaaaccagcaacttatgctcaaatctgtgaagcaatcaaagaagctgccgaaggcgaactgaaaggcgttctgggttacactgaagatgcagttgtttcaactgacttcaacggtgaagtattaacttcagtattcgatgctaaagcaggtatcgcgctgaatgacaactttgttaaattagtttcttggtacgataacgaagttggttattcaaacaaagttctagatctgatttctcatatctctaaataattagagtttagaaagccaagattgattttagagccaccctttcggtggctcttttatttttttactcggcagtttattgtattcaaatagtccgcgacataaggttataaaataatgaatgagaaaattttttctttgccggttattgaacaaatatcaccttacttaagtcgacgccaattaggtgaactccctattctggtgatctctcaccccaaagtacgtgcggctattagtcttcaaggtgcccatcttatcgcatggcaacccgcacaaacgcatcccgttttgtggctcagtgaagatgccttatttactcccggtgttgctattcgtggtggtatccctatttgttggccttggtttgcctcagcgggaacaccaagccatggatttgcacgtatcttaccttgggaatttagtgctcattctgaacaagaagacggagtgcttatcaccatgacactcaaagaaagtgcacaaactcaaaagtattggcctcatgaatttactgttattgctcgatttaaattaggtgatacctgtgaaattgaattagagtcatacggtgactatgaagccactgcggcgctacactcctattttaatgtcagtgatatcgataaagtttccattacaggccttggtagtcactatattgacacagtggcggataaagaagtttataccaacgaaacagccctacgctttaacggccgtactgacagactttatactgaacctgaagattttaatcttattcatgatgatggttgggatcgtactattgaggttcaccattatcatcacagtgatgtcgtttgttggaatccaggtgcagaactcgccagttcaatgaaagatatgagctcaggtggttaccgtaaaatggcatgtgttgaaacagctcgtattcatcgtccacttaagccggataatgttcatcctggacgtttatctgctgtgatacgcgtacgcaaaaatattgctgaaaaatagtttgccactctactttgtcgaacgaaaaaagcttcgaacaaattcgaagcttttagttatcgaaagcaacttaacttaccgttttaccgttagaaagtataagtgacacctgtccataaaatagccgttaccgatttatttaccatcgggctatctttaacttcgctgggtaagcgatccactcgtcccatcgcgaagaaatcccagttttcagcaaacttatagttagctgagatttcaacataaggtctccagctatcatttggtcgatattctgctaaaccactacgctgagattctccctgactaatcccatatgcgtaacgattctgctttttattttcccaaacagcaccaattcccggttgaagtgaccaattgcctagttcaaaaggataaaggtaagcagcatcagcaataatgccattacttttacctaaaagatcacctgaaataatccctcgtaaacttccccatgactcatgatgtttataggtgaatccacccatgacggtatcacggcgacgattaagttttttcatctgctcatcatcagagtcacttggtttaaatgcttgtgggtaatagtgaacatcgacagacagctgatctttcggtgaattccataaataatatcctgcggctaatgtcgcaaaatagaaattttcagattgataattaaccaaaggtacaggtaataaatagtctttagatttagcacccttataaggtgttacttgtgataatacagaaccccctattgaccattctcccgcaaaggctgtcggtgtactcaatccagcgattatggctaaagaaataacaattttctttttactcacgatgattttccatattgtctttgataaaacagtgaccaaaaaacgactgttgttatggtgcactaaaagttagctaatagattacaatcattttattttttacataaaatgactggcaataagtgcttgtcctaatgcaattccaccatcaccagatggcaatatcataggggttaatacctttttattgtttaatttttgcttaaacagatccttaagtaagatattattgaatacccctcctgttaaaacaatagtatcaatctgatgttcttgcgcagcttgcagagcaatatcacccaaactttcggctaataaatagtgaaataaccaagccttctcactggtattcaatgtgatgctttcccattgtgaccagaaaatggacaaatcaacatgcttatcttttacaggcattaaatgtccatattgcttgatgatatcagcataccgatctacgtgacactgtaacgcagcactttgtaagtagcatgccgcttcgccttcccagcttatttgtttaggtgataatcccaaagagcaagcaactgcgtcaaataatcgtccacaagatgatgctagcggtgaatttaaaccacgagccactgccttactcaaaatctgtaactcagtgagcggaattgcttgggtgataacactaccttgccaatcttttgtaaaagtagctaaatgtgcgaaccaatttcgccaaggctgtattgaagctaaatttcctcccggcatagcaaccgcaggtagcccgccaatacgttgagattttttataatccaccagcaaacactcgcctccccataaagagccatcttgtccataccctagaccatcaagggctataccaattactgcgccttgttgctgtgtatgtccatgctctgctaagcaagagacaatatgtgcatggtgatggggaacttctataacaggaatatgttgctgttcagctagctgtttacctatttgatggctgatataattaggatgagcatcaatggcaatcgctttgggcgtaaaacgatagatctgttgaaacagcgtgagtgatttcagtaattgttgcctcacacttaaatcatctaaatcacctaaatgcggccccataatagcttggtgctcttttaagagacaaaacacatttttcagatcccctcctaaagccaaaattgcaggttgtgcatcaaaagtggttggcaatgcgatagcatctggtacataaccccgtgaacggcggatcatcacacactgaccatcttcaatacgcactaatgaatcgtccgctctttgtataatctccctattatgcattagaaataattctgcaatatcaccaagctgaattaacgcctcttcattggttaatgcaggagtgtgtcccgtcgcattaccagaggtcatgactaatggaatttgtgtttcatgtgcgagaagatgttgcaaaggattagctggtaacataacacctacttctgttaatccaggtgcaatcagttcacttaatgaaataggggcgatttctttaggaataagtacgataggtgctgcggtactggttaatgtttctatcacttttgagtaaaactcggcattatcgctcggtttttggatctgctcagtcccggttaacatcaccgcaagtggtttggctggacgatgtttacgcgctcttaaacgcgcaacactttcactattgcgtgcgtcacagactaaatgaaagccaccaatgccttttacagcaacaattttccccgctaatagcgcctgacaagcttgcgttaatgcccgctcttttattgcaagttgttgcccttgatgatctgccaaccaaatatgaggcccacagacaggacaggcattaggttgtgcatgaaaacgcctatctgcgggatcttgatattcatgttggcaagtcggacaaaatggaaatgcagacatagaggtaaaaggcctgtcgtaaggcattttttttataatagtaaaacggggaccgcaatgggtgcagtttataaaaggatagtgataacgacgattttgtggatcaaacaactcatcaatacaagcctgacaagtcgctgcatcaggtacaacttgtgtatccatttctccaccaccactttttacaatagtaaagtccgtggggagttgctcccattgataaggtgtttgttcaatacgttcaatgcgtgcaagaggaggacattgagctgttaatgcattaataaagtgttgattttgcggtgataacgttaagtggatcaatactcctaagctatcattactcacctgccctaataaaccaaaatgatgtgctaattgccaaacaaaggggcgaaagccaacaccttgaacctttcctttcacacgcaatgtaatgccgttactcataggatcaccaaatcaaaataagtttaagcttattctagtttagtgattattaacaactttcatttagatcagaaaaagtagagtttgctacatttatcgtcacttcaaccgccactcgcggtgcaatagcgcacagtaattcataaccaatagtgccacaagccagtgcaacttcatcaaccggtaattgatttccccatagctcaacagggcttccatgttcaacatccggcaagtcggttacatcaatagtaagcatatccattgaaatacgcccaactaattgtgttttatgtcctttaacgataacgggagtaccatctggggcatgccttggataaccatcagcataaccacaagcgacaacagcaattctcatatcacgttgtgcggtatatcggctaccataaccaatttgctcacctttttttactgactgaatggctaatacttcactgttaaaggtcatcacaggttgcaaatcaaaatcagcaatatcttgccacaccccagagggggatacaccatataaaataataccgggacgaacccatgaatgatgggtttgtggttcaaataaaatagccgcagaattggctaaacagcgcggtaaatcatttaccattgagctatcaataatctgtttttgtgtcgccatattcagccctgtatcagcattggcaaaatgggacatttgtacaatagagccaatgttagttatgccttttgctctttgtatggcttgctgatagtcttctggtcggtaacctaaccgattcatgccactattgagtttcagataaatattgataggccgctctaattgcgcttgctcaatggcttcaaattgccaatcagcatgcacaaccgtcgttaatgaataacgctctaataaatacacatcatctggtttgaaaaaaccttcaagcaaaagaatggggcctacccatccttgctctcttagcataattgctttatctaattcaattaaggcaaaaccatcggtatgacttaatgcaggccaaacacaagaaagaccatgtccataagcatcagctttaaccactgaccatactttacttccctgcgctttcgatttgatcaccgaaagattatgactcagcgcatctaaatttatgctaattttggcaggtctggacatcgtctctccttaattaataaacagcgtcaagtttttgccctggacggagcaatttagtattaaatccatcgatataacggaacacggagagatcatctgcagcaattgccgttttattacctgatattaaatcagctaacagttgtcctgagccacatgccatcgtccatcctaatgtaccatgccccgtatttagggataaattacgatatgcggttggcccaactatcggtgtaccatctggcgtcattggccttaagcctgtccagaatgtcgctttactgatatcaccaccaccctcatagagatcttgaacaaccattttgagcgtttcacaacgtgattttaaaatattcaaattaaaacctaccacttccgccataccgcccacacgaatgcgattatcaaagcgagtcaccgcaatcttatatgtttcatctaaaatagtggatgttggtgctctgcttgcatcaataataggcatggttaatgaatagccttttaaaggataaaccggaattgtgattttatttttcaaaaattcagtcgagtacgatcccatggcgacaacatagtgatctgcggttaataaaccatcatggcattgcacaccggtgactttatcaccatcaaaaagtaggtgttttatttctttattaaataagaaggtaaccccggcctcttcagccattttagccagtttcttagtaaagatttggcaatcacccgtttcatcattaggaagacgtaatcctccggtaagtttatgactcacatgctctaaagcgggttctgctgattttagttgctcggctgttagcagttcataagccacaccttcttgctttaatacagcaatatcattagcggcattatcaaattgtttttgatcacgaaatagctgtaacgttcccccttggcgtccttcgtattcaataccggtatcttggcgtaattgacggatacaatcacgactatactcagcaatacgcaccatacgactcttattcatcgcataatgagaagcatcacaattacgtagcatttgccacatccagcgtaattggaacagtgagccatcaggtcggatcgctaaaggtgcatgtttttgaaacatccattttactgcttttaatggaatacccggggcaccccaaggtgttgcataacccggagatatttgccctgcattacctgcactcgtctcttctgccgcactactttgcctatcgacaacaatgacttcatgcccttgttgtactaagtaccacgcacttgttacaccaataacgccgccacctaagatgatcactttcatggctagactccaaataatttacattgatataacataagaataatattccatacacaaaaagccagcacagaataatcatctagcaccacaaaaaagcaaattttagagtcaaatcacatttaattagtaataacagtgttagttttgcagagtaattattaattctatttaaaaatcaagttgatagagtatttagcgctttttataaaaataatacataaatatattattcaaatataaattaaataagccaataaaaacccatcatgcaatttttatgaaaaaccaaaaaaattatcattatcagaatataatattaagatgagatatgtttcaaattttttttactaaaaatagccaaattaaagtatcacctaaaaatggctggttaaactaggcttgctgtttttagcccgctattctttcacttctccaataatagtcatcatatttctattactaccattttctggataataaaaaatcagcactggatcaataagatccaatgctgatgttaagacgggataaacgcgatgaattaacgttttacttcttctaagtcactaggtagtggcgattgaagctcatgccaaataatgccactctcttttccgtattggcgaacgcaatccataacatgctcagtatctttttgttcacatagcaacgccaattttttataaaatgatagcgccaactctttcgcctgaacattagagaaataataacgccctacacgggtatataatcccttaagtccgtttaagatcaatccataaataggattaccgctggcaaatgccaaaccacggaaaatgttatagtccaactcactaaactcatcagcactattttcagtcgttagttgatgagtcagtacttctagggatttttctggattatttttaaatgccgtgcgaataaaaattgctgagatattcgttcttacggctaataaattatcgattaattgtggcacgcgatcatgatcaagacgcgcgacagtttcaagaatattaagacctgacgtttcccaaaagttattcactttagttggttttccatgctggatagttaaccaaccatcacgagctaaacgttgcaaaacctctctcaatgtcgttcttgtcacaccaattaattcggaaagctcacgttctgcgggcagaatagaacctggtggaaaacggttgttccaaatactttcaacaatgtactcttccgcaaaacctgcggggctttgagccttaataaccatatttttatttcttccgaagcgttttttctgctaataatagaaaagataatatcagaatgcttaattttgatatagctcaaccatcgctaaatagtgaatggcatcataaaacatgacactgttttatcaatttattatttacgaatacgcttaatttcacagcgattagagcgtattatgactagattgcgcattttaggcgcctaaaatctctattcggaggataaaaaacataatggatatgagtataagacaagcattactgaaaaatttcatggggaactcccctgattggtataagcttgctattattacttttttaatcatcaacccactgatttttttctttgttgaccctttcattgctggctggctactcgttgttgagtttatcttcactttagccatggcattaaaatgttatccgctacaaccagggggattacttgctattgaggccgtcattattggtatgacaacgccgaaacaaataggtcatgaaatagccaacaaccttgaagtcattttattactggtctttatggttgcgggtatttattttatgaagcaattacttctatttgcttttacaaaattactcctctctattcgatctaaacgcttattatcattagcattctgttttgctagtgcctttttatctgcttttttagacgctttaaccgtgattgccgtggtgatcagtgtttctttaggcttctattccatctaccataactttgcctctaaccaggctgatgcagagttaagcaatgatggctttattgatagcacagagaaaaaacagaccttagaacaattccgtgctttcttacgtagcttaatgatgcatgccggtgttggtacagcattaggtggtgtgatgacgatggttggtgagccacaaaacttgatcattgcaaaacacttagaatgggattttgtcaccttctttatcaggatgtcacccgttactattcccgttttctttgctggacttgcagtatgttatttggttgagcgctttaagctgtttggttatggtgccgagctacctgaattagtgcgtaaagttctcactgactacgataaaaagaacagtgaaaaacgaactcaacaagaaaaagcccagttattaatccaagcattaattggtatttggttaattgttgcactggccttacaccttgctgaggttggtattattggtctttctgttattatcttagccaccactttctgtggtatcactgaagagcacgctttaggtaaagcttttgaagaagcactgcctttcaccgcattacttacggtattcttctccgttgttgccgtgattattgatcaacagctatttggtcctattattcaatttgttctacaggcatcagaatcttcacaactgtcactcttttatctctttaatggcctactttctgccatttcagataatgtatttgtgggtacggtctatatcagtgaagcattaagcgcattgcaagaaggattaattagccaatctcaatatgaacatattggtgtcgcaattaatactgggactaacttaccgtcagtggcaacgccaaacggacaagcggctttcttattcttattaacttcagcattatccccgctgatccgcttatcttatggacgtatggtgatgatggctcttccttataccattgttatgacactgttaggattactagctgtagaattctggctcgtgccaatgacacattggttatatgaaattggcttaatcgctattccataaaaaaccatcatgaaatgagtattttttagggcttttaatgtttaaaagccctattttttcataaaaacacctattaatgtaaatatttgtgaaataagagattttaccttttttttagtctagtttttaggcagaataacaacttatttcaatattatcatggacattgttatgttgagtgctcttcgtcactggtcacaaagtcgtttttcatggttactgctggcattaacggcaattggtcttgaaggtgcggcattgtattttcagtacggaatggaattaatgccttgtgtgatgtgtgtttatcagcgcattgctgtattagggatcttagttgccgcattaattggtttttcttcgccaaaactgacactaatgcgcatggcgggtagttttttatggctttatgcctcataccgcggtattgagctagcttgggaacatacgcaacttattcttaatccatcaccttttgcaacttgtgatttctttgttaccttgccttcttggtttgcattgcaagattggttccctgccgtattccaagcatcgggggattgttctgttagccaatggcggttcttgtcattagaaatgccacaatggatgttaattatcttttctgcttattttattgttggtttattagtattaatcagccaagtcacctcttctttttccaaaaaagactaacatacgctactgttagctatagaaagatagagcgcagataaattattatcatcacaaaaataggcgcttaatcagacattaagcgcctatttttctaattatcatttatttatgcatatccccaagcgtattaacctggaatacaggcaccatcaatcaacgcttgttcactacaacgtttaccattagcaaattgacaaacgggtgtttgaccgccgtgtaattcataagttaacgcaggcactccaccagaaaatatacaggtctcttttgctggttcctctaaaggaatagaaggtgtggtcgctatcgttttattgctattaatcacttgagcggtggtattttgcgcttgtttagattgactacagccagtaagcaacgcaaagctggtcaacatcaacaaaaaacacgttgctttcatttttctttgcattataaaaacacctaaattatctctgttatctctgattagtgtgaggtgctattggaaagtaagttaatcactaagacgccggcaataattaatgtcataccgacgatggcgggtaaatcgagtttttgttgatagacaaaaacagccgcaacagaaactaaaacaatacctaatccgctccaaattgcatatgcaatacccagtggcatgactttcacaacttgagatagcgcccaaaaagaaaaacaataccccaccacgacgacaatagatggatataatcgactaaagccatcggatgcttttaacaccgttgttgcaataacttcagatataatggctaatattaggtaagttaatccattcatttcttcgccctactaagatccaaattcaattttgtgaattctatcacaagatatttctgtgatatctattttagaacaacaaaaaaggcatctattcagcgcaatagatgccttaaaatgctatttatagattttgtttaatggagccggtttttttcgcgaggtttgcctcccatcgcaacacgataacgggtaaaaataaagccacaccacgctagtgcaataatacttaaggctgttcctgcatagccgatatttggcattcccgcgtgcaatattacttgattacctaacaaagcccctgccccaataccgatattaaagatacctgagtagatcgacatggcgatatctgttgcatcaggtgctaagtcaatcactttaacctgcaatcctaacgcaatacacataaagcctatcccccaaaagatgattaaggcaataaatgtgagtgtatgttggctacttatcatcagcgtacttaagcatacggttaagagaataagtgcaaagaataagaatgaggttggcattttggtactatagcgactaaataacacactccccaaaattcctgcaccgccaaaaatcagtaatacaatagtggcaaaattttcatctaattttgcaatatcaataacaaaaggctcaatataactataagcagtaaaatgagcggttactgcgatcaccgttagtaagaaaatacccactaatggtgctcgttttagcaatattgggacactttttaacgagccggaatgttcactgggtaataaaggtaaatagcgcattaaagcaagcatggttatcagcgccagtacacctatacccaaaaaggtagctcgccatcctaaccattgtccaaccacccttcccagaggtaaacccagcacggtagctagtgcaacaccggttgctaataaacttaatgcttgtgcttttttaccatggggtgccattcttattgctaatgaggcagtaatcgaccaaaaaacagcatgagcaaaggcgactccaacccgacctacaattagcgaattaaaatcccatgccacgccagataagacatggcttagaataaatacaataaacaaaataatcagtagcttacgtcgctctactttgctggtcattatcattaatggcaaagacattagggcaacaacccaagcataaatagtgatcatcaaccctgtttgagccggcaccatggcaaaactttcagaaatattacttaacaatgcaacaggtacaaactctgtcgtattaaatacgaaagcagcaaatgatagaataattaccctgatccacgccgtcttacggcttacttcattaatgctattgggtgtggtgatattcataattgtttaaatacttttcagtgaattttataaatagataaaagatacttatgtactactgccagtgaatttcataaaaagaagcgcaaatacccatcgttatattttataacatctaaatagaatagataataaagcgtgttttataaagcgataagtaaagataaaaacaaactaatgaatagaaaaacatctgactaaaacgaatcagcctattatgttagcataggcatagcgctaaattaaatccctacattggcttctttttaacgttaacattttatttggatcgcaaaagggagatcggcaaggaaaaatagcgttactgaatcacatttttattaataaaaaatgataaccatttcatgctattataaatagatcttcacgggcttattgttgcagttagtctaataatagagagtctatattataaaaacaaagagaataactatacagtagcttaatacttatggattaattctgtctataaattgaatagcttgctcacaggcaaagctttgggctggagatgagctatcattaaggctatttttaatagcaaaaatttgctcaattgatgaccgaggaagtaacaaactaccttccgctagtgctttttcaacactgtctaatttagacacgagttgattacaactttcactgttttctaatgattgataacgtgccatgacatcatcacgcttacctttgacaaaagaaaacatatcgttgatttgtgttgaggagttttcaataacattacggctattattccaagcagcaacggtatcttctttaaatacagaaacaactaagattgcaacaaaaatagcaatcataatagtcaatgatataattcctcctgcaataataattatttgtttcatgaaagcccccacatcactaatcatctttgtatctgtatataattaaagccattcatattcaatattgattacaattctttttattttttacattttattacgcagacaggtagccctattggcataagaaataatttattgttataatttaaatattgttaagttattatacttaaattctgattttaattattatttggatatgcgttaaaaataagatttatcgcaagtatatctggttttcattatagccattataacgattatttattcaagcatattgataatactttataagataaaacgtcattaaaagtaaagtattctaaacttttagttgtaaccttgaccttcccctaagggggatctttagaataaagataattcatacaatataaagggaacaatgatgaaaaaagttttacctatcgccatcgttttaatgggttcactctcttttggtgcaatagccaataattcacatatgaatatgaatatgggtactaatgtggcacagagtaactctcctatgaaccaagagctcatggattcaatgaataaaatgcatgaaaatatggcaaaaggaatgaatagtgctaatgcagatgttgcatttgcgcagggaatgattgctcaccatttgggagcaattgatatggcaaaaatcgagctaaagtatggtactgatcctgaaatgcgcaaattagcacaagctattattgatgcacaaggccctgaaattgaacaaatgcaaaaatggttagaaaaaaataataccaatatgcaaaataactaatatttgaaacgcagacgttctattaaggaaagtctgcgttttcttacattgccatgtcattaacctgtaactattagcgaaataacagcattatatcttctctatttaatgttattgcactattaaacatcagtatacctaaaaatataaacaatattcctgctaatagacgtagtagctccgccatatacctaaaagataaattagtattttttaccgaaaaccgataagcaacatttcgcatataataaactgttaatgcaattgcagtaatggttaaagccgttcctattgccattgcaatgacagctgctattccccaaagatagatatttaatgcatatgaaaataacaatactaacaatgcgccagagcaagggcggctaccaatagcgaatagtaccaacaattgtgccgaccaattcccttgtaattcattggaagtcaccacatgtttatgaccacaacatgatgtttgtgagatggtttgattgcttttatgtttatagagatatctagatcgcttgatgataggtgttgcctgtttaatataaaaagcacgctttttatagtctgacaataaacgacgaatagactggataaaaataataatgccagataatgaaattaataaatagctactattttcaatgtaatgactcgctatttttaaatgagagcttgataggtttaatattattaatataacagtgatgataactatggcaactgtaccttgtagcaatgaagcaaggacacttaaccacgcactttgttttaatttagtcgggtgagtagcaatataagtactaataatgacttttccatgcccagggccaacagcatgcagtaacccatacaaaaaactaacacctattaatataaagcctacttgccaattattttcgctaatatcttgcattaattctgcaagatagctattgataactttttgccattgaacattaaaataagttagttcagaccaataataagcaatcaataacaaacaactggctatcactgtgagtaagctaattagtaatcccctttccttcgttatatttattggcataatacttgtactcgttgtgtaaaagagagccctaaatttaaatcactatcagtagagccattgatatctaatgattgtgcatattcttttaaactttcatcagcaaaaggttcaatcagtttgtgtttacaatcagcgatcatttctaaaggcaatatgatctgtgtattgtcacgataggtcatgctgacataaaaagtgggatcataagttaaaagttcaaaatgatgtttagcgaatggcaatggggtgataaatagcacatcaaagctaaacttcacctgtaacttctcttttataagagtgtaatggcttggtatacgacgaaacttttgttttttcccatccatataaaactcggaaaaatagttctgagataatatattgctcattaatctcgccgcctgttttttccaaatatcactttctggttgcgcattatatatatcgtacagaatatccattgaggttatcggatccataacccaagaaaaagttaatccaattaacttatcatcttgtgtattaaaagttgtttgcatatcaataaagctatgaggatgtgctaaaacttttggtgtagtcatcaataaaaagaaagacatcaatatcggaactgctcgccaagagaaatttttaaaattagctatccacataaacaaaaccacccatgatattttgttataatataacatcacggatttgtaaaatgatagtcattttatgaaattattctaggtgtgttataacttggtttagtgaaagcgaggtgtttagaaagcaaaaagccaccctattgggtggcttagtatttttaacttactaaagtagtagtaaagttttatatggtgcccagggcgggacttgaacccgcacagcctagaggccgagggattttaaatcccttgtgtctaccgatttcaccacctgggctaaattgtatttatttatttttcttggtacttatttattagttaagtacataataaataaacttaaatcattttttgttttaactttatgtaactaataacaatatttattacgctaaaactacttttcctataccaaccaccagcgttgtagttagaagaaaaaacggacctaaattaaggtccgtattttatatggtgcccagggcgggacttgaacccgcacagcctaaaggccgagggattttaaatcccttgtgtctaccgatttcaccacctgggctaaattctgtggtgcgtccgtaaaattataactaatttttactggtaaggacgactaactacttcccaatgccattatttatggtctttttacaccactctctcaattaggagtggtgcccagggcgggacttgaacccgcacagcctaaaggccgagggattttaaatcccttgtgtctaccgatttcaccacctgggcatttatggaggcgcgtcccggaatcgaaccgaggtacacggatttgcaatccgctgcatgaccactctgccaacgcgcctcaactgctcaatctcttaagagattggagcgggaaacgagactcgaactcgcgaccccaaccttggcaaggttgtgctctaccaactgagctattcccgctttaccgaacttgctgatttacttatttatttctgtaaaccgttgtgcctttcgatgcgttgcattctactgatttcctgaatctagtcaacactatatttgcatctttttgactgttcggtgaattttcagtcatttcgatcaagcttcacgcaaatctgaccatgcagcactcaaatattggaacatagaccagaatgttaataccgtcgcaatgtataacaatacaaatccgaaccactcagcttcaatagtcggacgccataatagcacaacaagtgcacccatttgtgcggtagtcttcacttttccgatccaagaaactgccacactattacgtttacctaattcagccatccactctcttagtgatgagatgataatttcacgtgcgatcatggtcgctgccggtaaagtgatccaccatacatgatagtgttcagtaattaatactaatgctgtagcaaccattaccttatccgcaactggatcaaggaaagccccaaagcgagtggtttgcttccaacggcgggctaaaaaaccgtcaaaccagtcagtggcggcagctaccataaaaataatggcacaaataaggggagcatctttaaatggtaaataaaacaccaaaacaaagaatggaattaaagcgacacgaaataaagttagccaagttggaatatttagttgcatagcgttctacacgacctagaaaagtgagagttattaatatggtgcatcaatacacttagtgtttcaacgcattaaaaattttttctgctaacgcggtcgaaattgtgggaactttcgcaatttcttcaacgcttgcatcacgtaaagcttgtaaaccacccatatacttcaatagcatttgacgtcgttttggtcccaccccctcaatcgattctagagagctggtgtttttaaccttagcacgacgctgacgatgccccgttattgcgtgacgatgcgactcatcacgaatatgttggatcaaatgtaacgcgggtgaatcagaaggaagtgccacaccttcgccttctggtttaaaaaatagtgtctctaaccccgctttacgatcactccccttcgcgacaccaattaatttagggtgtgatttatcccaatcgacatcaagtgattgaaatacgtcaatggcttgtgctaattgccctttaccaccatcgataaaaataatatcaggtattttactctcttctaatgacttgccataacgacgagtcaaaacttgattcatcgcggcataatcatcccccggagtgatcccactaatattatagcgcctgtattccgattttaatgggccattcatgtcaaatacgacacatgaagccacagtttgctctcccatagtgtgactaatatcaaaacattccattcgttttatctctttcatctctaaaagtgacattaacgagttataacgttgagaaatggttgattgttcaacttgcttagtggctaatgccgtagctgcattagttcgtgctagttttaaatagcgtgctctatcaccacggggtttagtttggatatggatcttacgtcctgctatcgaagaaattgactccgctaaaatcgttttatcttcaagattaaaatcgagcaaaatttctgtgggtaaagtgcggatcgcactgccttgtaaataaaattgtccaataaaggtttgtaccacttcgtctaatgatgtatttgccggtactttaggaaaataactacgactaccaagcactttaccttgacggaaaaagagcacatacacacaagcaatagcaccattaaatgccacgctaatcacatcgagatcatcgccaatattagccacaaactgtttttcagtaacttgtcttaccgcgtgaatttggtcacgaatacgcgcagcctcttcaaagcgtaacgcttggcttgcctcttccattcgtttaattaagccttcaatcacttggctgtcatcgccggataaaaaaagacgcacataattgacttgctgtgcatactcttcatcagagacataaccttttacacaaggggcgagacaacggcctatttgatattgcaaacaagggcgtgagcgattgcggtaaacactatcttcacattgacgaataggaaataatttttgcatcaaagctaatgtttctctcaccgccaaagagttagggaaagggccaaagtattcccctttagcatgtttagcaccacgataactcgccaatcttgggtgtttgtctgcacttaaataaatatacggataggacttatcatctcgtagtaacacattatagcgaggctgataacgctgaatatagctatgctctaaaagtagcgcttctgtctccgtatgtgtcacggtaacatcaatattggcaatacattttactaatgcttctgttttacgactattcacctgagcacgaaagtagcttgataatcgttttttcagatcttttgcttttccaacataaataacggtgcctgaggcgtcatacattcgatacacacccggttgactcgttactcgacttagaaatgctttagcatcaaatatgttttccactttgtaagtaactctctatctcgattaacccataacgaactgctatatgagttaattctacatcacctgagattttaagtttactaaacattcgataacgatagctatttactgttttagtgctgatattcagctcttgtgcaatttgtgctatttttttccctcttataatcatcgacattatctgtaactctctttcagaaagatgatgtagcggatttaagtctgcttgtactttagttagtgcaatatccatagcaatttctggactaatataacgttgaccaatacagacttgtcgaatggcctgaagcacattcgcagcagaggaatctataacgataaacccttcaatacctaactgtagcaatgtgacggaaagtattgagtctattttaggcgaaataaccactatttttataatgggagaaaaacgtttaattctttttattacatctattaaagagacagtaggtaaagaataaaaaataataagattgacagaatattgtctgcaataacgaaaagcttcactttcatcattcataatcttacgaatgttaatttttttaatctggcaaagtaatttttctatacctaaactaaatatttcaacttgactgattactagagtatttatcaacgatatcaatccttaaaaatatttaataaaattaaaaataaatcaaggcaataaaatttataatgacaaatgctattataatatcgttagaatttccatatttttattttttattcacgcaacaatgatattataaataaattattattcttaccgcattaattaataatgtattaaaatcatacacacatttataaagaatataaaataaagctaataacatataataataattaattataggaataaagtacttcctatataaaatataagaagcactttagtactttaaaaatgatcaaatgtcaccgctttatcaaaagataatttacctaatcgtggaaaaggttttcctttacctttaccaatggcaatcattaaacagatagcatagtgatcaggcaagttaattgtttttgctacctcggcaaaatcaaacccatccataggacaagaatcaaaaccgcgctcttgtgctaataacatcagtgtttgagcaaacaaacccgcactacgcataatctcatcccgttgtacttgtggtttattacgataataactatcaacagcactgcacataatatctctgacttcagggttagcatcttgccaaattgttttaacttcactctcccaaacattgagatctgcacataaaacaatcagcatagcagagtctgttatttgaggctgatcccaacccacttttcttaatgcttgacgttgcttaacatcatcaacaaccaaaagacgccaatgctgcagattaaatgcacttggcgtatattgtaacgcatcttcaagtaaggcttttttctcttcttgtggtattttgaaatcagcatcaaactgttttgttgcacgacggttttttactgcatcaattacattcattattttccatccatttgctaatcattgacatttatttatctattatagaagaaatgcgttcagtatgcagactgtgctattatttctaattatctttgttaattaatcagttataacgaaaaaactacttattaataacaaaatatcgttataatagtattatcaaatatacgataaacctttatttttcctatttgtttttaagcgtaaaagaaggcgaaaacaattgatttaagcctaacacttaaatttgaaaaaagggtatcatcaaaggctactattcaatataacagaccttgcaaagtatattaaccctatgaaattaaatgatgaattaactaattctatcgcatcagtcacagaagctgctgctattgcggctatgccatgggtaggtaaacaagataaaaatgcggcagatgctgccgcagttgccgccatgcgagagcgccttaatagccttaatatcaatggccaaattgttattggtgaaggtgaaattgatgaagcacctatgctctatattggcgaaccagtaggcaacggccaaggtgaaaaaatagaaatcgccgttgatcctatcgatggtactcgcatggtcgctaccggtgaaaataattctttggctattttagctgcaggttttgaaggtagttttttacaagcacccgatatgtacatggaaaaactggttgtcggtaaaaaagcagcaggtgtgatcgaccttaaccattgccttgaatataaccttgatgctattgcacaaacattaaataaatcattaagccagttaacactagctattttagataaaccgcgccatcacgatattatcattgatttgcgtaatagaggtattaatgtcatcactttgccggatggcgatgtgcttgcttctttatatgccacaatgcctaataatcctattgatgttatgtacggcattggtggcgcgccagaaggtgtaattagtgccgctattgctaaagctttaggtggtgatatgcaagcgcgccttattacccgcgatattgctaaaggtaataatgcaacaaatagagaaattgcagcacaagaaatctctcgatgccataatatgggaactgatgttaatattacattgccacttgaaatattggtgcgccatcaggatgttatgtttgcagcaaccgcaattactgccggtgacctattatccggtgtcactgaacaaagcgattatttgcgtacacactcgttagtgattaatggctccacacactcattacgttatatcgaaaactatcatttacgctaacacgagaataacaactaaaaaagcgacacgggcttacgtgtcgcaaaatgtatttaaggggtatttatagttataattaattcatgctaataaattagctggattatcaatacacagcttatctattatcgtcttatcaatgccacgctgtgctaataatgaaagaaaaacgttaggcacaaaaccccaaccatttccgccattttttgcccacatctgttttaaaaacacatcatgacttaatacaatttggttaccataacctctttctattaaggttgcgacagcttcaaccgtatccatcacactgggtgccgcgccttctttagggaaagaaatatcaagacctatcatgtcaaattcaagccaaacacctcgatcaagcattttgcattgataatcgatatctttaccagaaggatctgaatgggctaacgatattttggctggatcacaccccatttctgttaaaagaatatctaatacttcatcaccacggcgttgccaacctggcatatgaatattcattgaggcataagggttattattttgagccagtgcagcggcacgtaaactatttttttcaccatctgtaaagaaaggagatacaccaatttcgccaatcataccagcacgaatatctgtaccgtcaatgccgatatttaattcatcatcgatcatttttgccatcgcatcaatatcatcagctaggcgttttccttcaaatttctcaatataaaggccggaagaagcaacgacattaatccccgttaattctgcaacttgttttaattttctaatatcacgaccaattgacgatgaacctgtagcatcaacaatcgttttgcccccaagctctttaaaattatttaattcaaaaataacgtcttcaatgggttttttatccatattatcgcaacaacaatatggatcgtattttagtccccactgaatatctgcactgacttttttatctactaaaacgtgtgagaattcataaaaaggttcatcaacaacgccagataaatcattaaataaatgttcgtgaggtagtgtcagccccatatccgcttttttaaccggacccgttaccgtttgaatataacctttcatgattatgcccctgctctttttactgatttagtcgctttaaactcaggaatggtagtaacaatggcgccgactaaggcaaataacgtaccgatgattgtgactaaataaacagtatttcccaacgaaggtaataataggtcaattaatactgaacccagtaattggcccgcagttgatgcaacacctaacattagtaaccctaagcctcgtactaaaatagccattaatgcaatagacattaaccctaaaggcccacctaaatacatccaccatgtagcaggaagctccagtgttatatgccctaacgccatacgtactactaacgcaatcgttaaaacagtaaatccaacaataaagttccaagtaatagaaaccatcatcgaacctgttgcttcagccacttttgaattacctgctggttgccatcccgctaataaacccgctaaaaaaggtagaatagctaagtaaataaaagaggttgaatgccactgcggagaaacgacaaaaagagtagcaacaacagctaatacggcacctaatacacgatatggggtgaagtatttcttctcatccacacctataccaaagcggtcacataataaacctgataataacagtgctgaaattaatgctgtttggaatgtagctattcctaatgcactggctgatgctccttcagaaaaaaccaccattgcgccacagaggccagcaaaccagttccataatggaattttacgtgttttaattaatgtcggaatagaagcaaattgctgacgatattgttttttggacataatgataaaaaacatgaccactaaaccactggcaaaagagataactgcactagcattaccgtcttttaatacatgtcccagttgcccattcaccgcagactgcattggtgatagcatccctgctaacacagttgctaccatcagcaagggtgttgataaattttttgtactcataagatgttccttttggattattgactatgagtgatttcttttttatttttcaagtaatcggttattttgttattagcgcagagtgtatctccgcgcttttttacttttcttactgctattgttattaagaactaacgtgcgatttgctttagaatattgacccacatatcagcataatgtggccatgctaaaaactctttgctcccccaatgcggtgaacagtcactcataaaacaagctgtttttcctttttcaaattgaccaaacaccagtagtggatcttcgccaatattcaaaaccgtttcagtgttatgtttagcgaacactttgttataaccaaggaacatcggccattcactaaaaccttttatcgtggcatgctctgcattaactggagttgcgaatactccttctggggcttccacacgatcatcaccctctaacatttcaacaggtaacacttgtgccaataaggtatttttatagtttgctttcgcttcaatacccataaatgatagatagccgccaatcattaataagccaccaccattagcaacaaactgtttaattagccctaatgcatttggaagtactttcatgttgtagaaagtatcgttttgcaagaggaaagtattagcaccaatatcactgatcacgatgacatcatattttgctaattcttcatcagtctgaggaaatgcgacctgaacggtatgtgcaggcatataatcaactgctacccctttttcccttaaacaatttaataaaaaagtggcaccttcctcatatttactagaagtgaaactgtcgtagccttttgagtggatcatatgaatgtgccatgactcaccaataaataagattttcattttttttcctctttcaaaaagattatttattcaggggattgagtgacaatctgtgaatatgttgtttgattgatgcgatgcatgacattaatatcttcaggcatttctgaagcattactcgtctcaacagctagtgatgcaaaagctgatgcatagcgtaacgcgtaagaaaactgttttccttttgctaatgaggctgctagtgcaccattaaaagcatcaccagcgcccgctgtattttttaccaccgcaggataagctggtgagtaaatatatttataaccgtcataagctaatgaacctttactacctaaagtaatgacaactttattaacacctttttgataaatagcattggctgcatttttagcagatactaaatcaacaacttcaatacctgataataagctggcttctgtttcattaggtgttaatatatctaacattggcaatagcttatcaataactttattgtaaggtgcaggatttaaaataatgggaatattattttcattcccgattgaaataatttcctttaatgcttcaatattagtttctaattgcaataaaattatatcggcatctataattttatctttttgtatttttacctcatcagaagaaatatccatattagcccctgaataaatagaaataatattttcaccactctcttctgacacaaagattgatgctgttccagtttgatgattttcagtttgatatatcgttgatgtttttattcttgatgacgatataaaatttactgcataatcactaaactgatcagtaccgattttggtgataaaatgcacctgtgcatcagcataacttgccgctaatgcttgattacatcctttacctcctggtgagaagataaatttattcgccaataaagattccccggtttctggcagtctgggcaaataactaatcatatcaacattaaatgaacctaatacacatactttatttactgccggctgccccgctaaattaattttatcaatttgatcattacattctaaaaattgtatgatttcttttttggcaactttgtctaatgtttcaaattcaataaaggccccaccatggcatcttttaattattcctttctcagccaatgtatttaaatctgatcgtatcgtttctttggtaacactaagctcttttgctaaaacagaaacttttactgcaccatgacctttgatcagattaacaatttttttatgacgctctgctttcatttaatgttacctctatggcaacaactttaatttattagttgttatgggattgtgattacaatcatatgttatttattaaaagcaaaaaaaagcagaaacacaaaaataaaaaacaaaaaaaagcagaaataaataatgatagtaataagattacttaatatatagaagccatctcccctctcataaaaacacaaataaaatcaaataataaaataacaaacactatattgattataaaacaatctaatattaattatttgttttttaaaacttaaataattaacttaaaaaacaataaaaaataaaaaccttattttataataatttagagttactagaataatcaaaaataaaaacaatcatcactatgtttaaataatcaactattttagtgaatcgagcaaagcttaaaataaattaatcttccatttttatagttcataaattagtacaattcttcttaccattaaaatgtatagccaatgataatgtaaattaatcatgtcaacttataattagaaatacagatacaatgattaaaatagaagcagtttttattgtctcattttgtgaggtagataacattaataacaacagtcattgaacaaactaagtataaataacctattttaagtaggcaaagtaagtaaaaatcttgctttatttattgatttatttttttactcgtcaatctttggcttattttgtaaatagctgagaatactaaaccactaacagcaactcactgatacaaaatataactccaataaaaaataaaaacttagatataaaaactaaaaatcaaaaaattcaagaagataaaatcagcaacaatgtgttctaaaatatctaatacctaaatagattgtaaaacaacctatttatcagacatattccgacacatttattttctagcgatgtttaaacttagtgtctaagattataaatataaattgagcaccaataatctgataaatacacaacgtaaagacataaggatatacctatgaaaataaaatcacttattgctatttcattattaagtgttagtgcttctctttttgccgctgaaagcaccagcacaacacaacaagttcaaggcgtaactcaagcacaaaaagatctcaatgattatgaaaaagtcatggtagaaaaagtttgggttaccacgcaagccattgacgagaaaggcaataaagttgacgctaataatccacaagtcagtaattattttggcctagcagaatattatcctaatggcacttttattatgtttacccctgaaggtaaacaaaaaatgcaaggggattggtcaatgtctaatgatggaaaaacgcgtacattagttgccaaagatgcacaaggaaaaacactatttactcgtgatgtagaaaatatcaccatcaataatgatgagtatacctatcgtatttacccaactgaaggggataatactgtttattttgatattattcatcacgttaagaaataatcataatacgttgtttcacctgttataaataattaagggctattttatggtaagtaaaatagccctttttttagttgtatgaccttaatataactagccttaaatcaaattttgagcttccccatcaacccaataaatcacattaagcgcttcttctggtgttgggacttccagtttgctcaacattctttccatcactttatcgggaaccgcttcctttcttgcgctgttttgttttttccattgcaaataagggacttcaatatataccaatgtcactttagcttgataacgataaaacagagcaataagttgattacgcatttgtttagtaatatttgttgcattccaaacaaaaggcttatgctctcttaaatatattctcgcttgctctttggcaagttgtgcaatccatccattcgcatcacgatcatctggttttatattatgctgctgacgtaatgcatctaaacttactacaggcatatctgcacaatattggcgaatataactatctttgcccattcccggtagcccacaaagcacaataacttcacttccttgctcaggataaggttcatagtgaggatcgacactattttcactatgaaaatagtgaaatcgagcgccatcagaaataaatcgtgcgggtgttctccaacaatttaattcttcacagtaaagtgtaaataacgctattttatccaataaagagggcttatcttcacagcttcgtcccagaacatccgccttagccagcaatgccaataaataacaatctacccttaacgaagccgctaataaggcttttttaggatcgggtttatccattaaccataaaggtaatccgtgatagcgtactaatgccgcaatctgttctctatcaataaagctaaccggcactttttcatataaaaaacgtcttgtcgttaattctcctttacgagcatggcctggcgaaataattcgcccattctcttcacgggtagttgaacgtttttctacatcatgtaaaagtgctgcaatccatagaatttgttgctctctttctgacagctcttggtattcagggagtgattttatagcgtggatcacctgctgtgtatgaatagctacatcaccttcagcatggtggatcggatcttgtcgaacaccggacatatcactaatttcatcatagtactcaccaagttgttcccatgacatttcgctatgtaattttttatgaagcatcatgagactcctgtgttttttcccaaatcagtggcgctcttttccaattacgtttccaatgcacatctgttttaacatgatcttttctcacatatttaaacacccgatgtgaaaattcatctaatgaaaatgcttgagcatctcgtgtgacaatgccttccatcgcacttggtttcttggttaacacatctcgtgattgaaaagagctatgcttttgtgcgtgtaaaataatattcttttcaaactctattttattttccgattttggtagcgagatttccggtacggtgggtaaatcaaataaagtggcataaaattgcacttcttcccaacttagccatttatcctgacaacgtatggcaaaaacatagaaatactcttccaaatgttggtattcaatagaatgaatggcataaagattttcaccaaaaatatctaaattacctaaatcatttctgatggattgccaacgctggcgtagttgtactgtccatgcagattgtgtcggagtcgcatgagagcgagcaaaaactcccattcgatttaagcaattattttcaccatctaatttttcagtatgaataagatgctttattttgcagatatcttgccaccaattggcattaatacgatcatcgcttgttgtgcctggtgaaaaaggatagtgatatgttctgtcatatttttttgattgattattcattgtgttatactcattaagtaacaggaaccctactaaatttatattaaaattcagtgagtatatttatctgtatttgcactatttatcttcagtgccttaatgcgtattacataaccacaacctaataactcaaaaataacaaaagaaataatttttgacatactacctgtattatcaagatagcactagaaaaaaatgtttatatttattattcattttctctcaatttttttcgttatttaacactccatgatgattgttcatctatccttaatagggtgacaacgctaataatgtcactctatgggtatttatacttaaataatgataaatatcttaatcctcagtcgctgtttacataacgatattgcacatgggaggtagtatgtatcacgatcttcaaggaaaagttgctgtagtaacaggttcgtcacgaggaattggtgcagcagtagtgacgagattagttcaagaaggaatgaacgttgttatcaactatcactctgatgaaaatgaagctcaagcattagccgatagcctaaatagacatggtaaaggtaaagcgattatttttggcggtgacattagtgatgaaaaaattgctcataactttatttataaggcgattgaccactttggtcagctcgatcttctgatcaataatgcgggaattgagacacaaaccccttcccatgcagtgaatttagaagattggcgtaaaattattgatataaatttaaccagttattttctaacggctcgctccgcattgaaatatttcgttgagaataagatcaaaggcaatattattaatatgtcttctgttcatgaagtgatcccatggccgacttttgctagttacgctgccagtaaaggtggcgtgagaatgttaacgcaatcactggctcttgaatatgcacactatggtattcgtattaacgccattggcccaggtgctattaataccccaataaataaagaaaaaatgcaagatgatgcgttacgcaaagaattagaagagatgatcccaatgaaatatgccgcagagcctgaagcagtggctaatgttgctgcttggttagcatcggagcaatctacttatattactggacaaactattttcattgatggcggtatgacactttatccctcatttcaaggtggaaaaggttaaagccgttcactgtcgtccatactgttaagataaccttctttccaaattttgcggtttatttatacttattctttgggaagaaggcttttatccttattttattcaatcaaaataacattttcggaatggataatattatcaggaaaaataagtgctctttcagaaataaacggcatatgtaatgtacgtgtgcccgttgaaatagaaacccctgcttttaaccatgcatcagccaccagctctgtacaaaaaacacctttatcttgctgaatactgaagttttcccctactcgatttaaaacagcttctaacgcttgttgtcgtgcttgttcacttccacgcacttggtaaaagcgtacagaattaggcttagcacgactgataaagaaatccaaactatcgatagtaacaccatctttactatcagcatgttcactgggtgttgagtgaacaacctgtataccttgctcagttatccacaacattcctacgtggctgaacccgctgttatcaacttgctttattatgtcgctaataacttcatcaccatcgcgaaaaaccagatcaccactttttaactgataagggaaagcgagcacagtcaatgtgctcgctaagtataaagttaatgcaagagtaaagcgtattatcacttaacttcaactttccatttgccatcaactttgatcatattttgattttctgttttttcttcaccatttttcaacactgttttgagtgtgacaacggctttatttttatcttcgctgtattcaacttttgctacttcaaccttacccaagccaccttgctctttaatttttttgcccgcttcggcaacgatcattttaaatttgccggtaatttgctctgccattggatctttttctaaatcaccaaaatacattaatgacacagccttatcaccatcaccggaagcgacagcttcaataaattcaaccgcggcttttcctgcttcgtcttgtttatcaccacatgcagataatgtcatcattgccaccgcaagaaacataaatcccatcattttctttaacataaattcaccatcaccataaatatttaatttaatacaataagcatcttatataaaaaggaaaaccatctcatacaacacactaatttatttataaactatgtttgtgcaatagaaaaataacttttctatcgcggaattatacgtgacattaataggtttcgtcataaattttttttaatatagaataatcctagtaaaaaatatttgaaaaaatccccccaacaatcgagtaaaatatttctatctatatttataaaaaaatattgaatatataatgaatctaaaagtgagcagaaacattattaccatataaaacttttttatgttctatttttgtatttttatctcgaaaaaagaggatcggcaacgcatcacgctgtcgccattaacagattcaataaaaatagttatctgttagcaaaataggtaaaatgccatatcattgacaaagcttattttaaaacacacaaagacagtatgttgcaaaatcagttacgatagtgatacaaaattacaataatgtttatctcaataaaacaaatctatttgttttttaatatttaatcatgatatgacaacacgattttctaagtagacctataacatttcggtgtaaaatacaaataaagactagaaattttgtgacacaatgcgcctttttacaccattaagtcaatttaagataaatagaaactgcattttggatcatgaataggtaatctagccatctgatttcaatgaccaaacatgaatagttataagggtatgctatgtttacttcacagctcatgctggtcggttatgttttattagtcagtccatgcgggcatgattcttgtgatgcggttccagtaacagaaaccatttataccaaggatgaatgtactattcgcttaaactatctcaaaaagaaaagacccgatctctatattttttgtggtgaagtattacgtgatcccgaagtgaccgatgaaaatccatacctaacaccgccaaatagcgccgatgatgtctttcaattaaaataatcaccctttttcgttgaacaccccacaaaatacaatttaatttgttttctagttacggtatactctttatacttaaaatatgtaaggacacgtattaggagtcactcatgtctattgcaaaacgcaccaaagacaaacgtattgcgttaggtttaacacagtctgagcttgctaccttggctggtacaacgcaacaatcaattgaacaacttgagagtggcaaaaccaaacgccctcgttttttacctgaattagcaaaagcgttaaattgtgaattatcgtggttgctcgaaggggataataaacaaacacacgcttctgaaatacctccccaagatgaatggcattcagtcagtgaatgggataacgatacccctctcaatgctgatgaagtcgagatccgttattttaaaagtattgaacttgccgctggtgatggctgctgtactaacgaagatcataatggttataaattgagattctccaaaagcacactacgccgctatggcgcttcaccacaaaatgtgatctgtttttccgtctatggtgatagtatgtctccggttattccaaatggttcaacagtgaccgttgatacaggtaatacgcggattgtggatggcggtatttatgctatcgaacaagattcattatttagaataaaattgctctaccgtcagccaggcggaaaattaattattcgtagctacaataaagatgaatttcctgatgaatttgcagaaattgactccgttaaaattatgggacgcgttattcactggtctgtgatggcttggtgatcatctgcatatttttattttagtttttactttcttgcacaattttcccattagataataacagcgttttatctgctaatgcttgcaattcacgaggctcatgagtgactattatcatcgttatctgctgtttttttaatgagataataagctcccacagctgataacgtgtttcccaatccaaacttgaaaagggttcatccattaataacagtttgggttggctaatgagtgctcttgctaatgcaactcgttgctgctctccccctgatatttgagatggataacgtgttgctaaatgagcaattcccatctgttcaagtaacgctatctctttttctttactgcgcttttgcttagccgcatattgtgccagccataaattttgctttacagtgagaaaagggaataaataaagacgctgatttaaataacgacaggggcgctgccaaacaggtaatttattcatattttggttagctaaaacaatatcccctgtatagccggtataacccgcaatagcattgagtaacgttgttttgccgctacctgatgagccactgatccctaaacaacacccttgctctaggtgtaatgaaacctcggttaaaataccggtagttaacgagtgaatggttaacatgctaatttcctatcacgctgtaaacggtgtaaagcaaacaatagagtaattgcaattgctatcagtactaaagcgcaacctatcgcaagcgagaaatcaccactcgctatatttaaatagattgccattggtaaggtttctgtttttaatcgtgtggcccctgccaacattaatgttgccccaaactcccctaatgctcgagaaaaagccacaatacaaccactgattaatacagaccaacaaagtgggatctcaaccaaaataagcgtttttgttggtgttaatcctaaattctgtgcggtttgaatataagcaggatcaatggctttaaacgccgcaaggctattacgcataatgattgcacttgccacatatgtttgagcaataataatccccaagggagaaaaaagggcgcgagataattgagggaaaacccctgttaaaggcccttgatgacctaacaataataataatccaatacctattaccaaaggaggcgtgactaagggtaaatcgagtaacgcatcaataaaacgctgtcctttaaatgacgatcttgccatcacccaagctgcaggtacagctaagagcacggctaaacacaatgatgttaacgcggtgctcagtgacatcaatacggcaaaatgaaattcagcatcagtaataaccatggtgagttcgtgataagagagttggcaaattaatgcaataagtgatcccaatatcaaaaataataataataaaagtggtattagtgcccaacgatacacagtgaagccttctcttaatctactaatgacatttattgtaaaaatgaaaaaagccacctgtgagccggtggcaaaaatacaaataatgtgagaaaaatctatggttttgaaataacaggtagaaaaccataatcagtaaaagcctttattccttcgggacgagaaaaataatcagccaattgttgtgcttgtgtggggtttgttgaggtttttaacaccgctagtgtcgcaatttcttcggggcttccttcaggtatgggtaataaaactaatttatcttggtttttcattgcatcagcgtaaccaataatggcagcatcaacctcaccatttaataaatacataagtaactgtttaatggttgctgtacgaacaaccactttatttcgtaactgctcaccttggcctgacgcttcgattaattgttcaccgcttttacctaatgcaattgcttttgcatctcccatacctaatttcaatgaactatttgcaagatctgtaatagttttgatctcaccgattttatcttttctgacagcaataacaggaatatgacgcacaataggatattggctaaccacctgattttgtttcgctaatttttctacatactcttgagagccgggaaaaaacagatcaccttgttgagtgagattaaagcgtgtaagaatttggcctgaaccgccatattcgatagtcactgtattgccggtttctttttcaaatagaccaacaacttgctctacaggctgttttaatcctgcgccagcataaagatgaagctctacagcaaagctattatggcaaaataatcctagtgcaaaacctaaacctaccaaaacttggcgtttcataacatcctcaaacacaatatcgttatataattttttatataatgatagatatgagaaattaaggcaagatcttagtaagaaaaaaacagcaaagtgctagcaagctatcattttacttttcatctctaatttatttattaagatatttttatcactctgtcgctagaataaaaatacataatcactcatattttgatatgcaatctagatgaaaaataacagcaatattaataacaaatcctcgtttaaacgaggatctcactattaaatactcaattccaataatgctaatgccgtcacttcatcgatgacaatatctgtagcatatcccccttttattgcgcctatggttgcagcaacattttcaacgcctccagcaataaaaatacgctgtgggatctgtcttaactgtgcaagactaattcccataattctaaggtcgatatcagaaagcagaggattaccttgtgcatcatagaatcgaccacaaatgacaccaacagcacctaaatcgcgatattgtgccatctcatttgtggtgagtacgcctgttgtaatcaaaggattgtcatcttgagtattacccactacaaacaaagctttattacattgatttaaagcagagaaattacgccgtattatgggttctgcttgtagctccattgccaaacgtgcatttgacactacagccggtacatgcaaattaatactgcaacctgaaaacttattggcgatcaaagcggcagattccgcagtagtaaaatcaggttgtggagctacagccccaatcatttgtaacacagtgacattttctagtgttttagtggggagatagtgccctagtttatggattgttcttccccaagctacgcctaaaatatcatcattgctgattatctgagaaagatacatagctcctgctttagctaatctttctcgattcatatttgatgtttgttgcgatttattcttttcttcatcaggtaaaataagcacattattaagattaaattttgcttttattctgattgaataatcaatcgtagaaaatactgatgaatccaagcttatattaacgaaacctttttctctcgcgagatgtaaatacttcacaacagtcactcgagaaacgctcataatatttgcaacttcactttgactgagtccgtcctgatagtaaagccatgcagcataaagaacgggatcattatcaaataaactcgcattttttagcgaattattatccattttaaaccccactattttttataaatcttattaataattaatttattttatatttacgatattgcagaaggtaataacaatttttgttgaatatgttcttataacacaattagatacatttcatttaacaactactaatatcggcaaatgggtgtttttctttacaaaaagaaactgaaaatatgtaaaatcaacttaataatgccgtaattatctcatatcgagaaagttttttttgaaaatatgtttttattcggttaaaaagagaaatcttagcgttaagttttaaaaagttttattttgatgatattaaagttaattaccctataacaaattaaccatagactcattaatacagaggaaaaatatgattatcgcttattcaacagcccctaatgaaactgtcgcccatgaaatagctcaccatcttatacaggcaaagcttgcagcttgtattaacgtccttcctaatatcaaatctatctatcattggaataatgaaattgttgaagataatgaggtacttatgatgatcaaaagcgagagttcaaaacaacagattttgattgatacactagtaaaaatgcacccttacgatacaccagaagtcattattgttcctatagaaaatgggtttcatggttatctagaatggatacatcaaagcctaaattaatgattatttcattgcattatcatgctatttcatcttatttgtgataaaaatgatagaattttgtaaataaaacaacacttacaatctcaataatgagacaaataaacaaagtaaaatattaagattaattactatttaactgctaaatcatttttaaaaacttttctttttgagattatctttatattcacagaaaaaatataagcaataaattattattaaatttttataagtcaaagaaatgaacaataatacgctaatgagcaaaggaaaaaataaaaaaacaacaaactggtttttataggttattatcctaaagaataaatttaaccgatatcttaccctggttattttctgttataattaacaagctttctctatattacatgtaaaaaaggagtgagttgtgaaaacaaacagagtcgcaagacgtattttaggtttaccttataatttaagtcggtctaaaaagaaagtgcgtttttccattattacgcctacagaaagtgataatcttcccgcagagttaaaaaatgcaactcggatctgtttaaaacaagatttcagaaaaaatgcgcaaaataagcgtatttatatgaaattaaccgatgcttatccagattatcttctagtaagttaattacttatgcctaatgttagattataaataacttttattttattatttataactaatagtttatcccttacaaccttgtaagggataatagtattctattattgatataattctttacgaatattcactaatacttgcttaattaattgaggattgattttttctggtaattgactttgttgaaaagcttgctcaattttttctattaatattttacttcgctcaaataatgtttcataacttaaagccccagatttaatttctaacaattcatccctgttatcacaccaaactttgacttttttttcagtggcaattcctaatgcaatataaagcaacctaaaagtgtgcatcatatttttactatcgtaacttcgtccatgttcaatattttgctgatagcgggcttcattacgctcctcaacccattgccaataagcatgatactgcttgcaataggtactgtagccgtctttattaaaactaagataggcttgtaatatggctgtttcagagacactgcttagtaaaacatcggtggcattatctttttttattacgccttgataatcactatttggatcataaaaaactgcataaagattttgtgcatgattgattttaaccaacccaatattttgctgctcccaacaacgttttttaagccaattattcagtaataggctttttccattttcaatgatataacagaaatcaaggatcgtttttaactctttatctataggatccatgattttcttatttaacccttgcgctttttttatttgcccttgagcataatgcacaaaagtctgtacgcattcctttgataaaaaccattctgggttaaattgcataaataatggatgacgataaataacaacatgctctggtgcatttaataattctaaaatattaggattagacgcacacagtaattcaacaaatcgccctaattcataataaacgatatcattagttttattacttacttgtggcacataatcagagcaataaaacatctctttaggtagataaaaaacacctttaatatcagtatctgaactatctgttgccaaattttgtgaacgactacctgaaattgtttcaaataaaaggtaaggctttatattgtcaatggtcagtttcatcaagtattttcctaaaccaattatttaatatttcactatctggtacggtgcgtttcgctaattgagttgctgtttcttgccataaaaaagtgatcagtttttgcatattatcggttggtagccaagtaaagtgttcatctttatctgctttaaagctcactaactctcgaataattatttgctcatctgtggttaatatatttattagctgattaagctccatcggtgggatattccccgtttttactgtccaataagcagctaaaagtgaacgtaagagatagaaatatttttttaattttatgggctcatctatcgctttacttgcatgactctcttcaaaatgatgtctactaacggcttttgcgatccctctataatgatgaacaatgatttggggttgataatataattgtgccaactcaaataattctttttggataccagcatattgttgataaacaataggtgattgtaaccactcaaataagatagcatttgacttacgtaatagatgcaatgctttcgtaatatcccaagctcctacatcaaaccaattattttctatccactcaaatgtttctttaggtttatcaattgaaagatatgcattgcgaggccgtataaaaatacctcgtacatcatagtcactatccgttgatgcgaagccccaagcacggcttccactttcagcaacataaagtagttttatttgatgcgtttgctctatttgtggcagtttttttaatatctgattatgcatgatgatgttactcggtatttccttacaactcttaaatttaataatgttgccaattatgatgatgactagagctaacaatagcaacataactactttagtgtcttaattttataatttatattttgataccgtcgcctataccgtcatttttttcggttcttgtcaaccattagcaaccatagaaaacaaaaaagccaccagtaacatactgatggctcttggttttttaacctttatcaactagtgctgataaacggtattttattcccactcaatcgttgctggtggttttccgctgatatcataaaccacgcgagaaataccatttacttcattgataatgcggttagaaacacggcctaagaaatcgtaaggtaggtgtgcccaatgtgcagtcataaagtctacggtttctacagcacgtaatgaaactacccagtcgtatttacggccatcgcccataacacccactgaacggacaggtaggaatactgtaaatgcttggctgactttattgtataaatcggctttatgtagctcttcaataaagatagcgtcagcacgacgtagtaaatcacaatactctttcttgatttcacccaatacgcgcacccctaaacctggtcctgggaatggatgacggtatagcatgtcgtaaggtaaacctaactcaagtccgattttacgcacttcatctttaaatagttcttttaatggctccactaaacctaacttcatatcttcaggtaagccacctacgttatggtgtgatttgatcacatgcgctttacctgttgcagatgcggctgattcaatcacatcaggatagattgtgccttgtgctagccatttgacttgcggtaatttaaccgcttcttcatcaaagatttcaatgaaggtatgaccgataattttgcgttttttctccggatcgttttcaccttttagcgcagttaagaaacgatcttcagcttcaacatggataatattgaggtcaaatttgcctttaaacatcgccataacttgttcggcttcgttaaggcgtaataagccattatcaacaaatacacaggttaagcgtttaccaatggcacgatttaataataatgcggtaacagaagagtctacaccacccgatagcgcgagaataacgtgatcgtcgccaatttgttgttttaaacgagcaacagtatcttcaataatcgccgcggatgtccataatgcgtcacaaccacagatatctaacacaaagcgttttaaaatggctaaaccttgatgggtatgggtaacttctgggtggaactgtacaccatagaaacgcttctcttcatttgccataatcgcaaatgggcaagtttcagtgctagcaatagtgacaaaatcagcgggaatagccgtaactttatcaccgtggctcatccatacatctaataaaggtttgccatcttcacttacggagtcttgaatatcacggaacagttcgcaggtttcgcggatctcaacttgtgaataaccaaattcacgttcacctgagacttcaacatcaccgcctaattgcatagacatagtttgcatgccatagcagatgcctaataccggcacccccgcattaaagacgtattccggagcgcgtgggctattgtcttctgtagtactttcagggccaccagacagaataataccattggggttaaattcacgaatttgttcttcggtaacatcccatgcccagagttcacaataaacgccgatttcgcgaatacggcgagcaataagttgtgtatattgcgaaccgaaatcaaggataagaatgcgatgattatggatatttgctgtcatttgtggtgaattccaaaacaaataaaaagtcattaaattgaaaggcttgttaacattttctgttttcaagcctttctcgaataattacatacctaaacgatagttaggcgattctttcgtgatagtcacatcatgaacatggctttcctgaatacccgcaccactgatgcgaacaaattcagctttggtatttaattctttgatggttgcacagcctgttaagcccatacatgaacgtaagccacccatttgttggtgaacgatatttttcagtaagcctttatatgccacacgaccttcaataccttctggtactaatttgtctgctgcattatcagtttggaaataacgatctgatgaacctttagacattgcgcctaaagagcccataccgcggtaagatttataagagcgaccttggaatagctcgatttcacccggagattcttctgtacctgcaaacatagagccaaccattacacatgctgctccagcggctaatgctttagcaatatcaccagagaaacgaataccaccatcagcaatcaccggaatattgcgatctttcagtgcttcaacagcatcagcaatcgcagtgatttgtggaaccccaacacctgttacgatacgagtggtacaaatagagccagggccaatacccactttaacagcactcacacctgcatccgccagcgctaaagccccttctgcggttgccacattacccccaataataggtaagtttggatataaagcgcgagtttcacgaatacgctgtaataccccttcggaatgaccatgtgaggagtcgataagaagaacatcaacaccagctgccactaatgcggcgatacgctcttcgttacctgcaccagcgccaaccgcagcacctacacgtaaacgaccatgctcatctttacatgcattaggcttgcgttctgcttttttgaaatctttaacggtgatcatgccttttaagtggaaatgatcatcgactactaaggctttttctacgcgcttctcatgcattttttgcataacaacatcacgcgcttcaccttctttaacggtaactaaacgctcttttggcgtcattaccgcagtgacaggttgatctaaatcagtgacaaagcgaacatcacgaccagtaataatacccactaattcattatctttagtcactaccggatagccagcaaaaccattacgctctgtcattgcttggacttcgcgtaaagaagtttctggtgttaccgtgataggatccgtcacaacaccgctttcatgttttttaacacgacgaacttcttcagcttggcgttcgataggcatgtttttgtggataaaaccaattccaccttcttgagctaatgcaatagctaaagatgcttcagtcacagtatccattgcagcagaaagcataggcacatttaagcgaattgtttcagtcagttgagtagataaatcagcagtattaggaaggacagtcgagtgtgcaggaactaacaaaacatcatcaaatgtaagtgcttcttttttaattcgtaacatagcaatatctcaccaaggcggcttttaagaaatggaaaatattgccgcggcattatacacaccgtaatcggttgcttctagctttttttgaaaatttttattgatcctctggctaacttaggtagtatcagtcaattaagtctttgttttaaaatttgatctggctcacatgactctaccgataaacaataatatttttactgttagccgtctaaataagaccgttcgccagttattagaaatggaaatgggtcgcatttggatcagtgctgaaatttccaattttactcaacctgcttctggtcattggtatttcacgttaaaagatacccatgctcaaattagagcggcgatgtttcgcggtcaaaacacaaaagtcacttttcgccctcaacatggtcagcaagtattagtacgtgcgactatcacgctgtacgaacctcgtggtgattaccaactgattgtcgaaagcatgcaaccggcgggtgatggattattacagcagcaatttgagcttttaaaacaaaaactaagtgctgaaggtttatttgatgctcttcataaaaaaccactaccaacacctgctaaacaaattggggtgatcacctcctcaactggcgcagccttacacgatattttaaatattttacgtcgtcgtgatccctcattacctattattatttatcccacagccgttcaaggtgcggaagcaccaatgcagatagtccatgccattgagctggctaaccgtcgtaaagaatgtgatgtgctaattgtcggccgaggtggcggctcattggaagatctctgggcatttaacgatgagcgcgtagcccgtgctatttttgctagtgatattcctattgtcagtgccgtgggtcatgaaactgatgtgactattgctgattttattgccgatcttagagcgccaaccccttctgccgctgctgagttaattagtcgcaacaaacttgagctattacgccaattgcagtcacagcaacaacgtcttgaaatggcgatggattattatctagcaaaaaaattacgcgcactaacacaacttcatcatcgcttacaacaacagcatccacacttacgccttgctcgccaacaaaatgtattggctacaactaaacagcgtttagtgaccagttttcagcgcctcctacaaacaaaacagaatcaacatactcagctacaaaaacgccttaattaccaagagccaagccctcaaatacaagcactactgcgccaacaacaacagttaatttatcgtatgagagaaagtatttcacaacagcttgctcgtcaacgtgaacaatttgcaattagctgttcacgtttagaaagtgtgagtcctctcgcaaccctttctcgtggttacagtattagtgaagttgcttcaggtgacgtactgaaaaatacgaaacaagttaaaaaaggtgatacgctaaaaacgcgtgttgaagatggctggatcaccagtgaagtgataaatacacaaaaaatacctgctaaacgtaaaccagcccccaagagtaagtcatccatttaaaccatatacatggcaaccataacaacggcatcttaatgatgccgtttgtgttacttggtaacgatggatagcagaaaacgctttcgccctgctttcagggtatattaccgtttatattaaaaacgaatttctccaccaaacaggaaacttctgcctctagccgtttgtttattttgtccctgttcatccataattggcgctgaattacttctatcaagtgcatttgaataatttttattcatgagattatgtaccgcaaattttaatgacacatttttattcatttgatagttagcgtacgcgttgatcacggtagggattttttcttgttcgaccatgggaatagtgcctgtatcaaaatcaaacccttcagctgaagctttacgacttttaccggtaatttgaatgatggtgcctaattcgagagatcggtcatcgaataacctcacaccagcatcaatcgttgcgtagtatttgggaagttctgatgcaggactttgcccaaaatcccccatcgcaagagaagtgggttgtgaggtgcgctcattgctataagaaagcgtggtataaaatacatcagcatcatagtttacttgtagttcatagcctctcatcgtcacaggatcaaggctatttgtgtataaatagatatttccatcgtattccatgccactgtagtcatcgtcagtaaaagtgccatcgattttacaacgtttaccccctttacaaacattataagaatcactggaaatatagtttttaactttagtatgataccaaagtgcttttaagcgaaagctgtctccagcaacaattaaatcagggcgataactattaaaacctatttggaaagtatccgctttctcacttcttaaaaaggggttcatcgatgccccaccttcattagcaaagaaaatttcctgtgggtttggtgcccttgtcgtatgggcataactgataaatggttcaaattcagggataatttgtgcagaaaagagtgctcccggctcccacgctttttcgtggcgattaacattcatcgcaccttcagggaaacacgctgctttgggatcacaagcgggtttatatcctttaatatgataatccgtatagtttaaatttaatgcgagggtataaatatcgtattcaaattttatttgtgaaaaaagactgctgatgtcgttttttccttgcggagcaaatacattgtattcaatcatattttgtgattgccatggatcgctcgaaggagctgtcacttctcgattataatcaatcgacatcagtttagtgcctaatgttagtgccatatccagctcatgataattaaatcgactggtatttttagcgacaagtgcattggaaatatttttcgcatgtccattgcgtaatgacattaaagagtcaccggcaaatttttgcgaagcttggcttctactcaataatatttcactatcaaaaagatcgtttagtggggtataacgatatttagcataataatcttggctctctatggttcttcgattaaatttattattataaaaccgaccgcttaattctatttcatgagaatcattaggtttaaacgatatttttgctaattcagaatgtggcttttggttaaagtctttagtggttgcaaactcatgactattaaaacctgccccatttttataagaagattcaatattatgtccacttatggcaaatatagcgccaatataaccatcatgattaagtatcggctgttttcctgcaatcgcaaccataccgttataacctaatccattagtccctcgagccgctttacttcttattccccaacgatgattagaaaataaaacatcatcaatacctattgttttaaaattagcactccccgctaacgcattaatactattttcaccatcttgttgaccacgagaaatatcaatttgcacaataaagttaggatcgatcatgctattaaactggttgtatggttgtccaccatgcgcatattggctaggtgacgtgctatacatcgtttgtgtcaccccatcaatcatcatattgactcgaccaaaaccacttaatccccggatattaaccccaacacccggctgactggcatccatttgggtgtaagttcccggtgtagatcgtaatgcttgttctaccgagctaagattattgatttcaccaatagcgctataagcccccggcttagataacgctttttgctctggtgtttgtttttgtgccgatgagacttttaaactactaaattgaactgttttttccgtttcagccgcaaacaccagagaatgaataccagaaaatagaatacaagagccaagtattttccttgttaattgagttttcataataaacctattctttgttttatttaaataggctcactttgctttctataagctaaaagttatttaatttaataaataacgatattgttattattgttttataagataaaaattaatagcattaaccctgtctctcattaaagagagacaggttaatcattaaaaatttaaaaggcttggtttaattacttgatattttgtgtcttaaaataaatatcaggctgctctaacattaaaataaaggcatattctctcgcagtatcacgtagacgattaaaacgaccggatttacctccatgtcctgcactcatatcggtttcaagcagaagtaaattattatctgtttttaattcacgtaatttagccacccattttgccggctcccaatattgaacttgagaatcatgtaaacctgtagtgaccaataaatgaggataggctttggcctcaacattatcgtaagggctataagattttaagcggaaataaacatctttatctgcaggatcaccccactcttcatattcacctgttgttagcggaatagaagcatccagcatggttgtcaaaacatcgacaaatggtacctgagccacaacaccacggtagagttcaggtgccatattgataacggctcccataagtaatccaccagcactaccgcccatcgcgtagacatgtttgggtgcaccataaccttggttaataaggtattttgtggcatcgataaagtcagtaaaggagttgactttatgctccattttcccttggttataccagcgtttgcctaattcaccaccacctctaacatggacaatggcatatacaaaacctctatctaataaacttaaacgggcagagctaaacgaggggtcgatactgctgccgtaagagccataaccgtaaattaagattggattttcgcctttcttaaataagtctttacgataaaccagcgatacaggcacctcgacaccatcttgtgcttttacccaaatacgttcactttcatacaaatcatgcttaaagcctttcacttcctgctgtttaagcaattgtttttctttggtttgcatattccattgataggtagaagaaggcgtagtcattgaggtataaccaaaacgtaactcttcactatcagcttgtggattgacacttagccatgccatatagacaggatcatcaaaaataatatttgttgattgtcctgttttccaatcaatttggcgtaatgacactaaaccttgtttgcgctcttcaagcactaaccaacgattaaacagttcgaagctttccaagtctacttctggctgaggagcaattacggtttgccaaggtgcatcgatagaggccgttttataaagaccatatagctcactttcatgattagagcgaatataaaattcacctttaaaatgatcgatataatattctcgcccttcttggcgaggagaaaaaaccaccatgggtttttctggtgcattggcatcaattaaacgatattcagaggttgtagagcttgcaatagtgactagaatataatcttctgatttgcttttctccatccaggtataaaaacgatcatcattctcttcaaagattttcacgtcttgttttctatcactaccgtattgatggcgataaatttggtatggcaataaagtttgcggatctttatctacatagaacagtgtttggctatcatttgcccatactaaattcgctgaaatattggttaaaacattctcttgccatgttttatctgtcagatctttataagcaactgtatagttacgacgtccttctttatcttcagcaatagcaatacgtttgttatctggactaatggctaaatcacctaattgataaaactcatgccctttagctcgctcattaccatcaacaagaatttcccattctccatcacttcctattggtttacgttgataaataggaaagtctttaccttcttggtaaatggtttggtaagtatagccattataatcataaggcactgaggcatcattttgtgccatacgctcaaccatctcattatagagcgtattttctagtgttttgcccgctgccattactgactcagtataagcattttcagccttaagatagtcaataacttgtttatctttgcgtgcatcatccctaagccaataataattatcagtacgagtgtcaccatgatctgtcatcacatgggggattttattcgctttcggtggcatcataataacgtccttctctgtttgagccattgtcggtgttgcggtgatcaagattgccatcatggcacctgttaatccctgcgtcaccgtttttcttgtcgcggataacatgtttaattccttgttatgttaggattataaagtcaatgtggaaaattcaattgccatttcaattgttatttgaccattaaaaagcagttcttctgggggctttggtaatggctgagcacgcttaataacactttgtgcctctttatctagtgagcgcacaccactgctattaatcaattcgcaggctatgacataaccttgtccatcaacaataaaacgcactttaggtgctcccgtacgcccttttcttttcgcttcttcaggataagctttataacgatttaaatgacctttggccttagcttgccataatgccaaggcatctgcttctttatttgcatcactatcataatttgcagaaacatcgttagcctgttgtttcgcaacagaatggcttgttgagggcgcggataaactcgatacattttcactgacaataggtgaaggtttggttggtgcaattgaaggggcaaccttaactgaagtctggttttgtagcacttttttcggcttttcaagcaaaatatctgcattttcattaataataagattgggttgtttctccgcaatctcttgctgctgctttttttggctggcgacagccatttgctgatcaacaccgacaatctgtttttctttattcaccgcttggacgttttcacttaagctaagcataacagccggtgcaggttgatggattatcaccgggcgttgttgcgtgatataaaaataactaatgactaaagtaaaatgaaatactattgataaaataaagcctgaatatcgacaaggctgtaattgcgccatttggttaacggaagaagagatcaacatatgcgtattatcaataatcaaggatgggctgcaggagttatccacaaataatcggcatgttcagaggtaatatcgctaccttcttctgccataataagtaccgtgactgtttcattaggggctaaatctttaatatgtaaaggtacacccattaatttagtggcatgaaatgagccggcaatcaacagtgcgggcataggggcatttaataaactttttgccattgcacgatcacgcagttgttggatcacggtcattttttcaatttgtgttttatcaagtgcaccaccatgagaaagctcaatagttttactaataagctgacgaacagcaggttgcgttgaatattcaccttcaatattaggtggatttttatatgcatttgtaatatcactgcgatcgatattagcagctaacaatggataatctgcttgtagcccttctttaatcagattgccataccctttccaagaccagcctttattccaattgagtacagacattaaacgttcatcacgtaaatattgtgagctagagtaacgttttttcgtattatcaactaagttttgctgatctggcgtcaacatctctaataaaaccgcaccttgaggacgtttattgggaagttgtgtcattaaccaatactcaatctcatggtgatattgattgtcatgtttttcgccaacaatcacccgcgattggctggctaattgagttaatagcgcattagctgtgattgtctttcctgtacgcgtatcaataatattggctgatgtaataatagcgggagttgtgctaggtacggtgtttttttctactgtactacatgcgcagacagtaataagtgaagctaataacaggaaccatttagatattgaaaaaaacatattaaccttatagttatatttacttatttttaatataggcttagattaatattaataagaataattatcaatatcattgttataattatttgtatttaatgttgacggattgataccgtaaaataaaaacgccttttattaaaaaaggcgctttgcttaaagtggttattttaatcagtttagcgattagcgttgagattgtgtttgtgcttcaaccacagctaatgccaccatattaacaatgcgacgaacagatgcaattggcgttaaaatatgggcaggcttagcaactcccattaacactggacctaccgttaccccatcggagctagtgacacgtaataagttatagctaatgcgcgccgcttccattgttggcatcactaacagattagctgaaccttttagtgggctgtctggcataatatcgcgacgaattgactcaactagagcagcatcagcatgcatttcaccatcaatttctaattctggtgcgcgttgtttaataagctctaacgcttttcttaattttatggatgatgggctgtcaaaagagccaaaacttgagcgggatactaatgctgcttttggctcaataccaaagcgacgaatagtatctgccgccattatagtgatgtcagcaagttgctcagcggtaggatcttcatttacataggtatcagtaataaaggtgttaccactcggcagtaatagtgcattcatcgcccctgcagtattagatccttcacgtaaaccaaaaacatttttatatatttcaaaatgttccgaataacttcccacggttccacagatcaagccgtctgcttcccctctacgtaccataattgcgccaatcagtgttggattaccaataacggctcgacgagcttgttcttgcgaaacaccacgacgtttcattatttgataatattcttgccaatactctttaaaacgcggatcgttttcattgtttacaacttcaaaatctctacccgcttgaatatgtaagcctaatttctgaatacgcatttcaatcacactaggacgaccaattaggatcggctcagcaagtcctaaagtgactaattcttgagtcgcatgcagaacgcggttatcttccccttccgccaatacaatgcgttttttctcttttttcgcttgagcaaagataggtttcataaataaattcgttttataaacgaattcattgaggtgttcgatataagcggcgaaatcttcaattggacgggttgctacacctgaatccattgcagcttttgcaacggcaggcgcaattttaacaattaaacgtggatcaaaaggttttggaataatgtattctgggccaaatgacagttcttgatcgccatatgcgctagcaacctcttcattttgttctgccagtgccaattcagcaattgcatgtacacaggcaagtttcatctcttcattgatagcggttgcccccacatccagcgcaccacggaaaatgaacgggaaacagagaacattattgacctgattaggaaaatcagagcgtccggtacaaataatcgcatctgatcgtaccgctttgactaacggtggtaaaatttctggctccggatttgctagcgcaaggatcagcgggtcgcgtgccatttttttcaccatctcttgggtcagtacccccggccctgagcaccctaagaaaatatcggcatcgttgatcacatcatcaagtgtgcggctgccgttatctttaatcgcataagccgctttagtttctgccatattggcttcacggccttgataaataaccccttttgagtcacaaacaacaatattttcacgctttaaccctaaagcgacaagaaggttcatacacgcgatagaagcagcaccggcacctgaaaccactaagcgaactttatcaatatttttacgaacaatacgtaacccgttgataatagcggccgtagaaataattgccgtaccatgctgatcatcatgaaagacagggatattcattctctcacgcagtttttgttcaatatagaagcattccggtgctttaatatcttctaaattgatcccaccaaaagtcggttctaatgaagcgataatatccaccaatttatcaggatcggtttcattcacttcaatatcaaatacatcaatgccggagaattttttaaataatacgcctttaccttccatcacaggtttacctgctaaggcgccaatattaccgagtcctaaaacagccgtaccattagagataacggcaaccaaattacctttcgctgtaaagcgatacgcagctaaaggattagccgcaatttcaaggcaaggagccgcaacacccggtgaataagctaatgctaagtcacgttgtgttattagtggtttagttggtgtcactgtgattttgccaggattagggaattcatgaaaatccaatgcactttgttgtagtttgtcttccatcttcatatcctttgtatcaatagggtaagggcttggttagtataatggtaatagctcgttaaatcatgatggtatcgacacttttttcaaattagttcatctcatttattataaaccgctcatacctatttctgggtatattattaacccagtttaatttcattatggaaataaacacgaacagaaaaaatacaatctttgtttattatttatctataactaaattaactcttaaaataattaaactttttatattgttttataaatcaataactatttttacttgtagttgcattttaatatagttaaaaattaacttaatacattgtaataaaaggatttatctatcattagaacttttattagtcgttttggttattttcttttttacccgtaacaataattggtgtaatattgccaaccgtcaattttattttcttattgttttaataagatatctgattctaatttttattccttatttggaatttattttttattttctgctgttgaaaagattacgcatattattttttagggagaggggttatgcctagctactcaattatgatagtggatgatcaccctatcatgagatatggattacggctattgttagagcaagacaaggaatttattgtagtaagcgaaagtggcaatgctcaagaagcaatcaccacagcaaaacagttaaatcctgatcttattatgatggatttacaccttcaaggacgctctggtattgatattattcgttctctgcgtcgctgtggtttaacatcttatgtattggttttatcaatttcagattctcgcaatgatgtgtatgctgcattagatgctggtgctaacggttatttattgaaagagtgtgaacttgatatgttgctactcagtttacgtaaagcggtggttgggcgccccgtttacagtgaaaaagtttggcaatatatccaattaagacaaaactattctgatccgctatctgcgttaacaaaaagagaacttgatgtccttcaagaagtggcggtgggaatgaaaaataaacagattgccgaaaatctgtttatctcagaagaaaccgtcaaagtacatattcgtaatatcttaaagaaactacaagtgacatcacgtttagcggcgagccttatcttaattaagcatcagcactaaacgaatttaccccgacattaagtcggggtaattaagttcttaaggaagccattctctcactttagaaaatcactcaatagggacaggataacttaatactttgaagtgattatcgggtaacttttcaatttttaactgataaagctctcggttgataccgttaatcactatatccagttcactaaatgctgactgtacatcactatttctagcccaagcaggaatatctttgacaccataataaaaatagatagtacttttatctgaatcgataggttgtatctcttttatttggctaataaaaaggtgtccataacaaaaatcttgatatggttgccaagcttttcgtcccttctcgcttagagagaacacccactcgtcaccatcgacagtttgttcaattaaaccagcatccattaatgcattcattcgctctaaaacccatggagcatcattttcattactgtaaacgggccatttcccttcgcctaaacacaataaataatcactgttaaaaaatgcctgtagggctgttttatactcatcaacctttttgctgtcttcatcttcattagcccagctaaaagtagagagtaaaagcaatataagactcagtgaaatacttttcatattttcttttaccaacggaaatctttatttctattactctacgttacacaattcgttacacttaggtgacaggttaatatccaatatattttataatgtaaataggatttttcactacaacaaaacctgctactttggatctgtataacacttatacgtattgataccaatattacgtattgtcatataaggaaaatatcatgtctactactaacctgacatacacgatgtacggcataaaaaattgcgatacaatcaaaaaagcacgtaaatggctagatgataatcatattccttatgtttttcatgattaccgtaaagacggtttgaaggaagcattattactcacctttacagaaaatttagattggcagacattggtgaacaaaagaggaacaacttggcgtcaattatctgatgaagaaaaaaatgctatcactgatgtgaatgcagccattgcacttatgcttgataaacctgccattattaaacgtccaattttagtctcttctgataatcgttttatggtaggttttaatgctaatgattacctgacttttacaggagcctaatttttatgtcctgccctgttattgaacttgcacaacaacttatttctcgaccttccgtaagcccagatgaccaaggttgtcagcaactgatcatcgaaagattaacacctttgggctttaccattgaaaaaatgccttttggtcagaccgaaaatctttgggcatgtcgtggtggtgagggagaaaccctcgcatttgcaggacataccgatgttgttcctcccggcgctaatgcattatgggataacccgccttttgagccatctattcgtgatggaatgttatatggccgaggtgccgccgatatgaaaggctctctcgcagccatggttgtcgcggctgaacgatttgtacatgcttatccgcaacatcgtgggcgtcttgcttttttaattacctccgatgaagaagccgatgcgcatgatggtaccgttaaagtggtcgagtcattaatatctcgaggagagcgacttgattattgcttagtgggtgaaccatcaagtcagcatcaactcggcgatatgataaaaaatggccgacggggttcaataacagcaaatgtcactatttatggtacgcagggccacgttgcttaccctcaccttgcacaaaaccctattcatatggcgtcaccttttattcacgagttagtgaatacggtatgggataatggcaatgagtattttcccgccactaccatgcaaattgccaatattcatagtggaacaggcagtaataatgtgatcccaggtgagttatttatacagtttaactttcgttttagcaccgctattacagatgaagaaattcgtcaacgtactgaagcattactacaaaaatatcagttgcgttatcacatttcttggtctttatctgggcaaccttttatcactggtgaaggaaaactactggatgcggtacgttattcagtaaaacactacaccaatatagagccaacgctttcaactagcggaggcacctccgatggacgatttatcgcccaaatgggtgcgcaagttgttgaattagggcctattaatgccaccattcataaagtaaatgagtgtgtcagtgctgctgatttacaacaacttagtcgcatctatcagcggatcatggagcagattattttatgataacccctttaatgttaacgggtcgttctacggatcatttagtgactttatcagaacgacatcatttacagtttaacgcgacaaaagcctttttagcgttacaacagcaagcggccaaagcgggatttaaattaatgcctgccagttcatttagaagttttgaacgtcagttagcgatatggaatggcaaatttgaaggcactcgccctgtattagatgctgaaagtcaacctattgatattcagacattatcagaaggccaacgctgtgaggcgattttaaaatggtctgcattacccggagcaagtcgccatcattggggcaccgaaattgatttttacgatcctttccgtttacctaatgggcaatcattgcaattagaaccttgggagtatgaacaagggggctattttgcacaacttaatgactggctgactgaaaatatgtcagcttacgatttttatcgcccttttaccgataaagagagttatattgcctatgagccttggcatatcagttatttgcctctctcttatgaagcttcacaggcctatactatcgatatccttcgcgctgttttagaagaagagccgattttaggtaaacaatggctattagataacttagaaacggtttatcaacgctatattgtgctaccagaataattagattttatttatcttaggagacatcttgtttatctattacaggaagtctccacataaatatcaacagacaggctaaaattatcagcaataaaattctcacccaccacattgagaccaaccatagcgagatagcaaaagtcactaaaatgactaaaatagctttcggcttagcccccttaggcatggcgcgataagtttgccaataacgcaaataaccaccaaaccaagagcgatatagcaaccagtgatgaaagcgtgttgatgagcgagaaaaacaccatgcagctaataacaaaaatggtgtagtgggtaacacgggtaaaacaacacctaatgtggctaatccaacagataaccaccctgctataatcaataatatccgtttcatgttatgctttccaaattatgcttggtcgctctaaggtaaagagtaaataaaaaagctcctcattctcaataacaattttaaaacataaggcgggtttatgcactggatcactgactattggtgggttattttaattcttttagttggaataattattaatgccataaaagatatgaataaaatagatccaaaacagtttctaaaaaataaacggaaactgcctccccatcgcgattttaatgataaatgggatgatgaggacgattggcccaacaaaaatgaccagaagaagtagtcgttaaccaatgttggtaagcctgtgctaattgctcatctttttctgccatcagttgttggcattgccgacgtagtgtcgtgacaagggctttcttacccgataacgaaaattgttttacacaggcctctacagattgcttatcaataaaaaatgccactaataacgggtagcgtgatctatcaccttgcagaaaataaccaacactttgatataccgttaatatagagcgatgggcgaaagcaaaacctgccatcatcagccagtgatctgcttcactggcgctaggcaatgcagtagcaagagagatacctgtttgctgagtgatataatcactttgtaatgcgagtgcttgttgtgcaacttgtaataattgctgcccctgagcactgattgggtaaatagccatagtagtataacagccactactggcttctttatgaacgcctaatctcaccagataaaaaccacattgttgccaaaaattggctaatgcgtcggtatagccaaaactgacagaaaggtaatcaatattctgtttctggcactgcttagcaatatccgcaactaattttgcagcgactttttgacgtcgatatgctggcaataccgcaattcggctgatgcgtaatgaagttaaacacattgcctcaatggataagccgtaagtgactaacgattgggcaacaagattaccttttggtcgacgtatacctcgccaaacatcttgtgctaaggctttcgctagtcccccttcttcaatacaccacaccgccccaacaagatgccgatgaataaatgcagaccaataatgctgtttttgtccatcgaataaacgtcgaagatctaaaggtgtggttcgataatgagcactggttaaaagttgataaaaattggctcgttgttcactatcgaaatgctggcatgaggtgatcaccacctcgccagattggttagcatgatgaaaagaaggctcatcaagtaacaacagttgattcagccaattttcgagtggatcgtcctgcgcccagcgaataggtacggtgagttgataattttgtaactttggaatgctatcacccagttttaaaataaagccgcgccctgttccttcatagccttgtaccgtggtggtcattaacactcgagggaagtgctgacaaagagctatcagttgagcaatgggtatagtcgccgcttcatcaataattaaccaatctcgacacaaatgctctgtatcacaaagggctaacaaattatccggtgagtagaactcgatggttttatgtgtatgagataatagcacttcaatactgtttctcgcaggggcacaaaccgtcactgagccaggccattgctctatcaacattcctgctaacgctgattttcctctgcctcgtggtgccgtgatactccatacgccagattttgcctgtaaaagatgcgctaataactgtcgctgttgtatggttggcatcccttgaggcaacgcccactgttggcctgtattttttatttcaggtagaacaaggggctgcgatgcttgccaaataatggcctgtttatctgctagtgtaatttttgctaaccaagccataaaatggggagtagatataaccccttgcgcatcattccagcgctgactatcgttatcaatataatgttgccactgaacaatatcgggtaaacataagataagccaacttcctgctttcaacgttcccgttagcatcgctagtgcatcagcattaaaagcatggttagcgtcaaatacagcgtgaagatattcacggcctaatagttgatgagcatgttctggttttatcgcctcagacatctctgaagagagtattagccaatcgcctttacactgctgttggatagctcgaagttgttccctttgccatgtatagctccccgctaaaaggagtaatcgccgctggcctagtcgagcgaaggcttgttgatagcgcaataaatctaaagatggcactactatgacttacctatcaataacgaaaggatccccgcagcaatcagtggacctactggaacccctctaaatagagcgacaccaataacagttcctacgagtaaacccgctaccgttgacggttggttattcataagtgacaccccccgtgcccctaaccaagagacgatgataccaattgcaatcgctagtaatgatttccaatttaaaaaagaattgaaaacttcttgtgcggaaatgcggcctgtggcaatcggtgtcataacacctatggtgaggatcaagatcccaatggtcataccgtatttttcgactaatggaaaatattggtttaacggtgtgattttaataaccaataaaaagatcatcgctaaagtgacagtcatattatgactaataatgcccaggcctgcgagtaccagcaaaattagcaatgagggatcaacattactcatctatttttataatccttctctttctctgaatcattctaatatcatttaagcgtgagatgttattagttcaatgacgaagaagcaaatgtatcacaagatttaatatcgccactattgtagccgcgcataaaccatgtcttacgttgttctgcagtgccgtgagtaaagctatccggtacagcgtaaccctgttgttggcgttgcagcctatcatcaccgatagcttgtgcggttttaatggccgtcagtaagtccgcttcatcaacacggccttcaccggcaataaagcgcccccacatacccgcaaaacaatcagcttgcagttctagtcttactgataagcgatttgcttccacttttgaacgtgccatttgctgtttttcacgcatttgtgtggtgataccaagtagatgctgaacatgatgtcccacttcatgagaaatcacataaccttgagcaaactctccacccccaccaaggctgtttttcatttcattataaaaagagagatcgagataaattttttggtctgcaggacaataaaaaggccccatcattttagtgccggtaccgcattgcgttgtggtactgttggtatatagcactaatttaggatcacgatattgctcgccggctttggcaaacatcccttgccaaaaatcttccgtactggctaatacaacactgctaaaatctgccgcttcattataaagggcggattgttgttggctattttgtgttggttgtgatgtttgccctgtaagcgaattaaaatcaaaccccataaagcttgcgatcaccaaaataataatgatcacaaagccatattttgtacgtaataatagtgcaattaatcctaatgggagattaccaccaccggatgcagaagaaggctgccctcttctatcttcaacattattgcttcttcggcgatcattccaacgcataacccttccccattatgtaattcacttaattttaattgctaggtcattttgatgacaacttatcttagataataacaaaaattatctcatcgctattgcctattttttaagagcaaaataatagcacccattagtcactttcaattcatcttagttaatttttctttatagcatattaaaaaggtcagtttttaagctgacctttttcttttatggataatattgctgacgtaatcgattgcgcagttagtctaaagaaacaccaattcgacgtgcaacttcttcataggcttcaattaatccacctaaactttgacggaagcgatctttatccattttatctaaggtgtttttatcccataaacggctaccatctggtgagaattcatcccccagcacaactttaccgttaaagaggccaaactctaatttaaagtcaacgaggatcagaccggctttatcaaatagttcactgaggacatcgtttgctttataactaagacgtttcatttctgcgaggttttcttttgatacccaaccaaaagtttcacagtaagattcattaaccatcggatcatgacgggcatcgtcttttaagaagagatcaaaaataggtgggtttaagacagtaccttcttcaatacctaaacgtttaaccagtgatccagccgctcggttacgaataacacattcaacaggcaccatatcgagtttttttactagcacttcattatcagagagcaaacgttccatctgcgttgggatacccgcttcttccaatttgttcataatgaaataattgaacttattgttcaccattcctttacgatcaaactgttcaatacgttggccatctaacgctgatgtatcgtttctgaattcaagaataagataatcagaagactcagtggtataaaccgttttcgctttaccacgatacaactcagcttttttttgcatctgacacactccaaagatgtgataggtttaacaagaaacttgctttccatactctactctagattggataaaaaagcttttaaaacgtggaggggatcactaaaaaatatcactgtcgactattttttagcggctctaatcaataagagaaataagtgaattgagtgataaaaaggccgcacattttatgtacggcctgatatttaatagataaaaagagcttttattttattggcttactaaaggccgctttcattgcagcaaccatctgatcattttcagactgtgtaagaggtttacctttatcactgataaattgcaaactactgcggttatttaagtcaccgacttgtagtttgtaatccccttcattaattgtcggtttatcaacccctaacgtgctccaacttgcactacttaagcctttataagtcacttcaattgaacctttcgaacgagtacgatcgcccattttcatacccacgctttctagcgcgataggtaatctatcccacacaacatcaaatggtgctcgaacaataatgacaggcagtccggcattatcacttcccgtttgtacgtcgataataccttgcaaattactcgttgcgctattttcacttaagttacgcatgcggtttaaaccgtcaaccacttcatttaatagtaaggtgttataacgcttcacttccattggatcggaaatctcgttttcaccttggcgtaacccagtattcgtaatcgttaatatcacaacattacctgactggcttatcgctaaattatggcgactttggaaaggcacattttcatcagcacgagtccaagtgatccaatcggtaacaatctgtttttgtcctgcatcacttttagccagtgccacacctttatccgctaaaacagcagaaacttgctcgtataaggtggtattttcgggcgtgttgggtaataacagtcggctattatccgcattattctcactacgtgagccacttaataagtttaaagcctgtgttggtgggcgaatatctaatgctaaacccacaggttcactctttttaggcgtaggaatatcatattccccattttgcaaaggcaacaccatacccgctgggacaactaaattttttagcgctgctgactctaaatacgactcgtcaccactgacttgacgtttatagcgctgatcactggaacaggctgccaataaaaccaccagcgacagacccgcgactttcataatctttgatttatgcaatagtgttgccattaaaattccctaagttttacagtattcccgctgttaacagcgctttctctacgatatcctgacccgctgatgttaatggagtcatcggtaagcgcaatgtggcgtcttcaatcaatccaatacgttgacacgcccatttagctgggattgggttaggttcaacaaataactgatgatgtaagtccatcaggcgtcgattaagttcacgtgcttttgcaaactcacccgcttttgccaatcgacataattctaccatttctaacgcagcaacgttagcagtaaccgaaataacaccatgaccgccaagttgcataaagtctaatgaggatgcgtcatctccacttaataagataaaactatcatcattaactaactgttggatttgactaacacgacttaagttccctgtcgcctctttaattgccacaatattatccaactgagctaaacgtgcaactgttactggcaataaatcacatcctgtacggccgggcacattatacaagatttggggtaaagccgtgctttcagaaatcgctttaaaatgttgataaagcccttcttgggaaggtttattatagtatggagtaaccgttaagcaccctgcaatacctttattttcaaactgttgtgtaaaccaaatagcttcagaagttgcattagcccccgtgcctgcaatcacaggaatacgaccatcagccatatccagagtcattaatacgacatcaacatgctcatcatggcttaatgttgccgattctcccgttgttcccacagagacaatagcatctgtacccgctttaacatgataatcgaccaacttgcgtaaactaactcggtcaacattgcctttcgcatccataggggtgactaatgccaccatactgcctgtaaaatcaaaattgttacttaccataattcattgctccgagatagacttatacacaatggtactcattcattgctctattgaaaactacttaactctaggtttctaatgaaatttgctaatattctttgatttgaattaaagagagataataatgaaagatagtgcgcttctgatcttggcagaaatcaaattttgtgtttacctgttaggaataaactgaaagtcaaaaggaagcctattttgcctatacctgataaacattttctcgtactcactgcattagggactgaccgtcctggtatcgttgataccattacgcaattagttagccaatgcgggtgtaatatcgaagacagccggcttgcgatgttcggtcaagaatttacgtttatcatgctactttctggtggttggaatgcgattgcccaacttgaagcattactgccgataaaaagtgcagaacttgatttattgactgtgatgaaaagaaccaaaatgggtgcgccagtctcttacccatcaaccattactgcaaaagtagatatagaagatgcccccggcattgttgaacgttttaccaatttatttagtcaacatcactttaatcttgcagaattagtttctaaaacccatccttctgaggatggtactcctgctcgtttagaaattcagatcacggcccataatccgctagatgatcatggtctcgttattcatgagaaattcaatcaattatgtacagagttaaacgctcaaggcacaataagtatcgtaaatagtctgatgatgaaacaataaaagaatggagaattaggtaatgaacccattaaaagccggtgataaggcacctcaattcagtctgcctgatcaagatggagaaatcattaatctgtctgattttgctggccaacgtgtgctcgtttatttttatccaaaagcgatgacaccaggctgtacaacgcaagcttgtggcttacgtgatgagatggatacactaaaaaaagccaacgtcgaggtattgggaattagtactgataagtcagaaaaactttcccgttttgccgaaaaagagatgttaaacttcaccttactttctgatgaagatcataaagttgcagagcaatttggcatttggggtgaaaaacaatttatggggaaaacttacgatggtattcatcgtacgacgttcctaattgataaaaacggtgtgattgaacatgtgtttgataattttaaaaccagcaatcaccaccaagtggttatcgattatttagctgcacacccatagtttatgatcacagcttagtgctgataaataaaacagacagccattaactatcgctgtctgtttttttattatcaataagttgatgataaatcgcgtctatattactttttcttttctaatgtttctaaaggtggctcattggcaatttcatcaggcagcgcatgtaatactgctttgattaacgtcgctaaaggaatggcgaaaaacaccccccaaaagccccacataccaccaaatataatcacggataagataatgactaaggggtgcatattgacagcttcagagaataatatcggtactaataagttgctatctaaaccttgaaccactaagtaagcgataaatagcgcccaaaaatcagagcctaatccccattgagaaagtgcaattacaatgactggaatagtcgcgagtaccgcccccacataaggcactaaaaccgaaacgccaactaaaaccgctaataagactgaataacgcaaatcaaaaaaagcaaagacaaaataggtaaatacaccaacaatcaccatttcggtaaccttaccacgaatatagttggtgatttgctgattaacctcaatccacacttgtgctgcaagaattctatttttgggtaatacccgacggacagcattgagcatttgttgcttatcttttaataaaaagaacgtcattaatggcacaaggatcagataaatagagagcgtgataacaccgattaaagaggctaaagagacttttaacactgactctgccaccgttgaaaatttactgcgcaagttttccgccatcatatccacgatgccaacatccattaatgcggggaatcgttcaggtaattctcgagcaaatgcattgaatttattgatcatattagggatatctgaaattagcgtcatggcttgttgccataccgttggcgctaaaatcaaaataacaatggcactaatacctataaatagtgtcagaacgattgatacggcccaaattcgtgcacatcctaacttctcaagtaagtgtgttggccattccagcaaataagctaatacaatggcgactaataatggtgcaagtatgccactgaaaaagtagataattgaaaaaccggcaattaagatcaccaccagcgcgataacttggggatcagcaaatcgacgtttataccattgaacaagcaagtccagcatgaaaatagaggtcctttataataataagtcaaatatatctatatgtattgatttacataatcaataatcttttgacggattttacgttagcttttgctatgatacatcattaattataaatttttcgttaagatagctatcaggatgttgttgtatgaaactcagacttaaaaaaccactggtcgcgcttcttgtttctactttgctatcaacatcagtgttgcctgctcacgctgcgattgatattgaagataccctgcccgatatgggaacgacagcaggctcaacattgagtatcaatcaagaaatcgctatgggtgattactatactcgccaattaagaaatagtgcaccattagtttttgaccctctactttctaattacatcaataacttaggtcaaagattagtctctaatgccagttcggtaaaaaccccctttcacttttatttagtgaataaccccaatattaatgcctttgcttattttggtggcaatatcgtattgcactcagcactatttagatacagtcgcaatgaaagtgaattagcttctgttatcgcccacgaaatttctcacgttacccagcgtcatcttgcaagaatgttagaagatcagtctaaaaccacgccactggctatggctggaatattaggctctattttaatatttatggctaaccccaatgctggtttagccacctttacgggaagtatggcggggatgcaacaaaacatgatcaccttcacgcaaatgaacgaacaagaagctgatcggataggaatacaaactctttatcgtgcagggtttgatccacaaggtatgcctaattttatgcagatcttagcagaccaagtgcgctatagttctaagccgcctgaaatgctattaacgcaccccttacctgacagccgtttatctgatgcacgtagccgagcagcgcaatatgctccgcgcaaagtgccacaatcggctaattttctctatgctaaaatgcgggtattgaccatgctagagaaaaaccccgcatcaagtaacgccttgcaaaccacgctggatcagtttaggcaaggaacggaattagaaaaatcagccgccaattatgcacaagccttactctattctcgtgatcgtaaatttaatgacgcgagaaaaatactcgcccctatgctggcaaaagagccaaataatatctggcttattgatgccattaccgatattgacgtagagcaaaaccgtgctgcagaagcgataacacgtttacaacaagcgcttaagcaatcacctaataacaaagtactgacggttaatttagctaatgcttatatgcaaaataagcaatataacgaagctaatcgattattatatcgctatacctttgacaatcctgacgatcctattggttggcaattggtggcggaaaatgcggcaaaacaaggtaatcgagcccaagagcttgcagcttacgctgaagatttggcattacgaggagattttgaaactgccattcgttatcttggtgatgcgagtcgtcaagtaaaattaggcagtaatgagcaagctcgttttgatgcacgtattgatcaattgcgtaaacttcaacataaagacagtcaatttaaataagggataatatgaccaacaaagtaacgatttatcataatccgcgctgttctaaaagccgtgaaaccttacatttattagaagatatgcatatcacccctgacgttattcattatttagatacgccgccttctgttgatgagttaaaagcattactcaaagcgctagattttgacgatgcaagaaaattaatgcgcaccaaagaagaaatttataaaaccctaaagcttgctgatgagagctcacaagaagcattaattcaggccatgcataatcatcctaaattaattgaacgtcctattgtggtcgttggcaataaagcgcgtttaggtcgtccacctgagcaagttaccgccctttttaagtaggctaaattggcaattgccgacattgacggtatggcgcatcactaaaacgtaatctgagtgatttcagagcattgagacgagaaaccttacggctgttttcaaagatcggtgatgcgccctaataactcattatctgcagtgcgctcaaaatgacagaaaaccaacacgttatacctattaacttacttcactcctcttcatatcaataacacaattctctactgctttattaccacatcacaacggtgttaccgccatctgtatattctaaaggtcactaatgttaattttatattacaagcactaaggaaacacgatagttatttccattagtagaataaggtagtttattgcttgctttcaaaatatttcatcttaatttcattttttttatagtgaatattttaccaagatcaaaaatatctatcacgatcacattatcctgttacaaataacagccaacagaaaaaatttatgaaacgtttcatttgtattgtgacaaaagtctctttacacgagtgaattcctacttattatggtcttcagaaaatatgatggcagatttgatttgcgatacacttcgaaccatttttattttcgttatcatccaattcagaaattaatattagagatacaatttaaacaatactgcaacatagcaaaatacgttaattcgccacttcttttacacatgcctactcgctatctcactagagatagtgcgttatgttttttttaaaagtgtatagatatcggcaaactaactgaaaatatagccaacatatgggcgactaaaactaatcaatcatcaaaataccagatgattgccaggctaataggaaatttaatgaacatcgtacatagactcaaacttgtttcattcctccaattttttatttggggctcttggcttgttacgtttgcttcatatctatttgataaattacattttaaaggtactgacgttgggctaatttttagtgctttaggattagcatcactgatcgcaccggtgatcatgggatttattgcggacaagataaataaccgtaagctggtctttattaccctgcatattttatccgcgtttgctttagtactgatgtctcaaatgaccacagtgactaccctcttctttgcgacacttctgcatttattgttctttatgccaagcatttctatggcaaacagtattatttttgagttactagagcaaaaacacctagagccaaatgactatttccccaaaatccgtgtttatggcaccgtgggttttattgctgcaatgtgggttattagcttcttaggtttcggtaatagctacgatcaactgtttgttgctgcaatagcctctattatcttagcggtatttgcgatgtttttaccggcgacaaaagcgacagataaaacagaagcaaaagaagaagtggccgcttttagcttatcgaataccttacaagtgtttaaaaagaaaaatgtggttattttccttttctttgccacattgttaggttcagtattgcaaattaccaatacatttggggttccattcttacaagatatggccaaagcacctaatgctgatgactctttcttggctcattatccttctgttttcttatccatttctcaaatttctgaagtggtctttattctatttttacccctgttattaaaacgagtgagaatagaaactatcgtattatttagtatgattgcatggatcttacgttttggtttcttcgcttacggtgactattcatcattaggccaaatcgttctgttgttatccatgattgtctatggttgtgctttcgatttctttaatatctccggctcgctattcctagaaaaagagatcccattacaatatcgctctaccgcacaaggtatgtttatgaccttagtgaatggttttggtacttatttaggtgcgatgctaagtggctgggttattgatttgtataccacagatggtgttattgattggcagtcattctggttgatctttacgggttacactgtggctatcaccgcactttatctgatttacttagtggttccgcagaagaaaacaaaagttgtagaagcacattaattatttcccccattctttatttgttgcactcaccgcttatctttcgagataagcggttttttattactggttatctattgcataatgcgttgttttaaatagattgcgattaaagcttaagaatatcttttacgaaaggaatggtcagcttacgttgagccacaatagaggcgtgatcgagttcatctagcatttcaaataatgtgcgcatttttctatctaagcgctttaatacaaaacgacccacatcttcgggtaattcaaatccacgtagtttcgctcttaattgtagtgcttgaattttttcttcatcgcttagcggttgtaagcgataaatttgcccccaatctaggcgagaagcgagatcaggaagttgtaaatcaatttgacggggaggtctatcccctgtgattaatagacaggtgcgaccaagttctaatacgcgattatacagattaaacagagcaagttcccactcttcatcacccgcaatacattgaacgttatcgatacaaactaatgaaagatgctccataccttcaagcacatctggtacgaaataagcccgtttatcaagaggaacataaccaactgcatctccggctaaagaaagctctgcacaagctgcatgcaacaagtggctttttccgcccccatcacgagaccagaaatagatataactgccatgtgattggtgaatagcagtttggatcgctgcaacgagtgatgcattttcccctgcgtaaaagctatcgaatgtctcatcatcgggcagagatagtggtaatgatagctgtgatggcgtattcagaagcacctcacctgaatagtttaataaacgtcgtgattctaacacaaattctatcaatgacagaatcaatattaaaaaagcaagacgagctgcttaagatgacagcaataaatagcgaaactgtttattttgacatcaatataagatcagtttagccattctatttcactatttaaacgttatcttagagagatcgtgacctgagggttgctggtaaatatctaatttaaaatacttagcacaagcatttatatactcaaaaatttctgattgtgtctcttcatattccacccatgtggtagcacgagtaaaacaatataattcaacgggtagtcccattggtgtggggggcattgttcttatcaccaaatacatatccggcctaacatcaccacgcattttgatccaatttaacatatactttctaaaaagttgtagattggtcactccgttggtttctaaccaagtattaatatcacctatctcttcttctttaccttctaacatcgcttcaatgctttttttaagtggcgcagtattttttagctcctgcactaactgttctgtagcaaatgaaatagaggattgatcaatatagaaactacgcttgatacgacggcctcctgaagagaacatcggttgccagttagtgtatttttcggttaaaaagtcctttgtgggtatacgagaaatcgtgttatcccaattacgtactgtaattgtgtgcagtgcgatatcaatcacttcaccactaatattactgctgggtaattcaatccaatcatatagttttaacactttaccatttgagatcagaatattagcgacgaatgagataagggtatgttggaaaacaaacatcaataccgcagcgatcgcaccaaagctggaaataataatcagtggggattgttcagtaaatagcgcgataataagaataaaggcgatgatccacaccactatcttagcaatttcaatataacctttaatcgaattgttacggtgccacgattttttagcatgcctgatattgaaaatatctaacgcgttattaagaagagaagcaatattgatgacgataaaagcacgacaaaccgtttcaaagataatattcatctgtgctgaaaaagaaggcaataactggtttatatagagaaccagagtgactgcaacaatagaggcactttttttcgcaatatcttctatcgtctcttcatctgagagttcggtgaataaaaacaatagacgcttggctatacgacgaaagatcatctttgccagaaaccacaccaccagcaacgtgatcactaaaaacagcgtggtgaaaatctgcttagatacgataaagtcgtatatatcaacaagtttttccataactagcgtcgtcacccttttaaaagctttgttacaaccttaaaacaacttttagctcaataatagctaaaaagtatcgctatcactaaaccactaacaatctcattgtctcatttatttgcgttaaataaatattattattaagtttattttctttttctaagttttaaacgctttttataacaaaagagttcttgtttatcttataagaataaaaaaataaccaataaaaaaagcagtctatgactgctttttagttcaatgacgaaatattagcgaaaaaagctcatcaatgattacttggtgtttgtatgttcgttaattgactccagagtatcatccactaactcagtttctgggcgaataatactcaccagcttaaacactaaacttaaaacaataccgactatcgttgctaaggccatgccttttagttcagctgcgccaatttgaattgatgcaccacttacaccgacaattaaaatgatcgctgttaatatcaagttttgtggtttgttataatcaactttcgaatctaataatacgcgaataccggacgcccctattacaccatacagtaataaagagacaccgcccattaccggtacgggaaccgctgcaatcgcggctgccaatttaccaacacaagaaagtaagatagcgataattgctgcaccaccaatgacccaagtgctatacactttagtaatagccataacaccgatattttcaccgtaagtcgtgttaggtgtagagccaaaaaatccggagataatggttgaaaaaccatttgcaaacatagagcgatgtaagcctgggtttttcatgagatcacgttgaacaatattcgcggttaccacaaggtgccctacgtgttcggcaataaccactaatgccgccggcaagataataaaaatagcactccactcaaaacgcggcgaataaaaggtaggcagagcaaaccaattggcttctttaatcggtgtcacatcaaccacgcccataaagaaagagagtgcgtaaccggctaacacgccaataagaataggaataatagccaaaaatcccctaaacatcactgagcctaaaatagtcacacccagtgtcaccatagagattatcaatgtttggctatcaacgggattatctgcgctaggtaataatccagccatattagcggcggttccggccaactcaagacctattacggcaacgattgcgcccattgccgcaggaggaaacatcacattaatccatcctcgtccggcgattttcacaatgccagcaacaaggcaaaatagcaccccacagacaataaacccgcccaatgctaattcatagcctaaaggaagtagcaataacaccggagagataaaggcgaaacttgaacctaaataagcaggaatacgacctttacagataaagagataaagcagagtaccgataccgttaaacaataatatggtggccggattaaccttaaacaaaatcggcacaagtacagtagcaccaaacatggcaaacagatgttgaaaactcaatgggattgtttgtaataatggtgggcgctcttctaccccgattgcacgacgagtcatgcttacgacctctctttaaaatagatataaatggaatttaaatttcagcgataaaacaaaccaataagtgatccaaaaaaaagccgactatcaaagtcggcttaatcattattttgtaccaaatatcttatcacccgcatcaccaaggcctgggacaatgtacccatgctcattaagatgcttatcaatcgatgcagtatataactcaacatcaggatgagcttcttctaatgctttgatcccctcaggcgcagccactaacactaaaactttaattgaagtacagcctgaattttttaataaatcaattgtggcaatcatagagccaccagttgctaacattgggtcaacaacaagtgccatacgttcttcaatatgagaggctagtttctggaagtaagggacgggctttaaggtttcttcatcgcggtaaacaccaactacactgatccgggcactaggaatattttctaatactccatccatcatcccaagaccggcacggaggataggtacaacagtaattttttttcctttaatctgttctatctcaaccgggccacaccaaccttcaattgttaccgtctctgtttctaaatcggcggtagcttcatacgtcagtagactggaaacttctgaagccaattcacgaaagcgtttagtgcttatatcatgatctcgcatcagccccaatttatgttgaatgagtgggtgttttacctcaacgatcttcataatttctcctaatgtacgacgcagccagacaaaaaaatcgcgagattataccgcttttttagtgactttccatcgtttttctattgatattgatcaatcgcacagcttttaaccacactaacatgaataattgtgatctaaaaagaagatcctcgcaaacgtttgctttgcctgttagaatagccaccgcacacattttttcttaacagcaacttgccgtgagggctagacgtgactaacaaatcctctctcagctataaagatgccggtgtcgatattgatgcaggtaatgctttagtcgatcgtattaaaagtgtagtaaaagaaactcgccgtcctgaagttatggggggtttaggtggttttggtgcattatgcgctattcccactaaataccgcgaacctattttagtgtcaggcactgacggtgtcggtactaaacttcgccttgcgatggacttaaatcgccacgatgatattggtatcgatttagtcgcaatgtgtgttaacgatttaatcgttcaaggtgctgagcctctcttctttcttgactactatgccacaggcaagttagatgtcgatactgccgcacgggttgtaacgggtatcgctgaaggttgtaagcaatccggctgtgccttagtgggtggcgaaacagcggaaatgcccggcatgtatcatggtaacgattatgatatcgccggtttttgtgttggtgtcgttgaaaaatcacagattatcgatggtagcaaagttaaagcgggtgatgcattaattgctctcgcttcaagtggccctcattctaatggctattcactgatcagaaaaattcttgaagtcagtggtgcctgtgctgaaactaccccattaggtgatacatcactggctgataaactcttagcgccaacccgtatttatgtaaaatcactcctgtcattaattgaaaacgttgatattcacgcagtggcacatattactggcggtggattttgggaaaatattccgcgcgtgctacctgaaaatacgcaagctcgtattaatagccaaagttggcaatggcctgaggtctttaactggctacaacaggcaggtaatgtcagcactcatgaaatgtatcgtacctttaactgtggtgtcggcttattaatcgccgtgagccaagctgatgttgaaaaaacgctatcacatcttaatgcctgtggtgaaaaggcatggttaattggtgatattgccccgcaagcagcgggtgatgcacaagtgattatcaattagtaaaagtacccccatgaaaaatattgtggttctgatctcaggaaatggtagcaacctacaggcgattattgacgcctgtagggcgcataaaatcgcaggccaagttgtggctgttttcagcaataaagcacaagcttatgggcttgaacgagcgagacaagcggatatccctgcttactttatcgatccggctgattatcctgatagagaagcttatgataaagcgttaatcactcaaattgatggctatcagcctgatattgtggttcttgctggctttatgcgtattttatcgccgttatttgtcaaccattatcagcataagctattaaatattcatccctctttacttcccaaatatcccggtctgcatacacataaacaagttattgagaataaagatacttttcatggtactaccgtacactttgtcacggaagaattagacggtggcccgatgatcattcaagcgcgtattcccgtctctcctgatgataccgaacaaagtttgcaagcaaaaatacaaacacaagagtatcgcatttatcctctcgcaattagttggttagcagaagagagattaaaaatgatagataatcgggcgctacttgatggtaatgttctgtttgacaatcttgattaacggtttcacttaagataaaaagtcactttgtgctacactgtagcccgcggtgacttttattgtgtcacccttttctctttttattcaatgcattttcaccgaggtgcttatgtccggtggtaagaaagttccacctataaaattacgtcctctcgaaagagaagaccttccttttgtccataaacttgataataatgctagcgttatgcgctactggtttgaagagccttatgaagcatttattgagttaagcgacctatatgaaaaacatattcacgaccaaagtgaacgacgttttattgctgaaagtgaaggcacaaaagtcggtttagttgagctggttgaaattgattatgttcatcgtcgtgctgagtttcaaatcattatcgcccctgctcatcaaggccatggttatgcagcccgcgcggcaaagttagcgatggactacgctttttctgtacttaatttatacaaactctatttaatcgtcgataaagagaatgctaaagcgattcatatttatgaaaagcttggctttaagaaagaaggtgatttaatagatgagttttttgttaatggctcttaccgttctgcgattagaatgtgtacattccaagccccttattttgaacaaaaagccaaagcagcaagaccggaaaattttgttaaaccgggtgcaacgataaaacaatatgtctgattaattcagataataagatttaactttaacccatgttggagttcagatgtcccaagaacgactctatattgataaagagatcagctggcttgcgtttaacgagcgagtattgcaagaggcggcagataaacgtaacccgctaatcgaaagggtcaggtttttggggatctattcaaataatcttgatgagttttataaagttcgctttgcggatgtaaaacggcgtattttaattaatgaggagcgcggctcacgctctggctctagtcacgctcgtcatttaatcaaaaaaatccaatctaaagttgccaaagccgaccaagaattcgacgcactgtataacgacttgcttttagaaatggcgcgtaatcagatttttttaatcaatgaacggcaaatttcacctaatcaacaaatttggttacgccaatattttcgccaaaacttaagaaaacatatcacgccgatccttatcaaccctgaaactaatttggttgagtttttaaaagatgactacacatatttagccgttgaaattgctcaggggcaaactattcactacgctttgttagagatcccctctgataaagtccctcgttttgttattctgcctacagaacaaggccgaggtaagaaaaagtcaatgattttgctggataatatcttacgctattgtcttgatgagatttttaaaggcttctttgactatgattctttaaatgcttattccatgaaaatgacacgtgatgctgaatatgatttagccactgaaatggaatccagcttattagaaatgatgtcatctaccttaaaacagcgccttaccgctgagcctgttcgttttgtctatcaacgtgatatgcccgatgaaatggttgctttactgcgtagcaaattaggtttatctaataatgactcggtcattgctggtgggcgttatcacaactttaaagactttattaattttcctaatgagggaagtaagtttctattaaataaacctattcctcgtttacggcatgtttggtttgataatttccgtaatggctttgatgcaattcgtgaacgtgatgtgttactttattatccttatcatacctttgagcatgtattggaattattacgccaagcgtcttttgatcccagtgtcatttcaataaaaatcaatatctatcgcgtagcaaaagactctcggattatcgattcgatgatccacgccgcccacaatggtaagcgtgtcactgtggtcgttgaattacaagctcgctttgatgaagccgcgaatatacattgggctaaacgcttaaccgaagctggcgtccacgttatcttttcagcgcccggcttaaaaattcatgcgaaattatttattatttctcgtttagaagaaggcgaaatcattcgctatgcgcatattggtactgggaattttaatgaaaaaaccgcacgcctttataccgattattctctgttaaccgcgaatacagaaattaataatgaagtacgtcgagtgttcaattttattgaaaacccttatcgtccggtgacttttgaacatttaatggtatcaccgcaaaactcacgtattttgttaaaccagttgatcacaaatgaaattcacaatgctcaagcggggcaccctgcgggtattaccttaaaagttaacaatttagtcgatgaagagttagttaatcgtctttatgatgcctcacaagcaggtgttaaaatccgcctattagtacgcggtatgtgctctttagtccctaatcagcccgattttagtgaaaatattcaggtcaccagtattgttgaccgctttttagagcatgatcgtgtttatgtctttaccaataaaggggatgagaaaattttcctatcatccgcagactggatgactcgtaaccttgattatcgtattgaagttgccgtaccactactcgaccctcagctaaaacagcgtattttggatattcttgagatccagtttaatgatactgtaaaagcacgatatttagataaagatctaacaaatagctatgttcctcgaggaaataaacgtaagatccgcgcccaacttgctgtatatgaataccttaaatcattagaacaaccaggatcacgagcgtaatcaatgcctttattacaagatgactcttcttcaccacgtcctttagaaattgcggctatagaccttggttctaatagttttcatatgatcatagcccgtgttgtcaatggtgccttacaggtattaagtcgtttaaaacaacgggtatatcttgccgatggtcttgatgataatgataaactcagtgaagaagcaatgttgcgggggctttctgcactttccctttttgctgaaaggttacagggatttccagcagaaaatgtcactgtggtcggtacacatacgttacgggttgctagcaatgccaaagtctttttgcaacgcgcaaaagaggtgatgccctatcctattgaaattatttctggtcacgaagaagcacgcctgatctttatgggcgttgagcatacgcaatctgaaaaagggcgtaagctagtgattgatattggtggaggctctaccgaattagtgatcggagaaaattttgaacccatcttgatcgaaagccagcgtatggggtgtgtcagctttagccgtcaatttttcccgaaccaaaaaattagcgaatccgcttttcgtaaagcacgcgaaaaagcagcacgtaaaatggaaaaaattgcttggcaatataaaatgaccggctgggatgtcgcattaggcgcatcgggtactatcaaagctgcacatgaaattttggttgaatttggtgaaaaagatggtgttatcacccctgaacgcctattaatgttgaccaaacaggtactacggtttaaaaaatttaaagatatcaccctaccggggttatccgatgagcgtaaacacagttttgtacctggtttagccattttatgcggtattttcgacactttaggcttaaaggcactccatttatctgatggtgcattacgtgaaggtgtattgtatgaaatggaaggccgttttcgtcatcaagatattcgccagcgtaccgccaaaagccttgctgaacactataatatcgatcgtgaacaagctaagcgcgtcctcaccacaatgcaatcactgtatgctcagtgggcggaacaaaatcctaaactggttcgtcctgatctagaagcgattttagtatgggcggtgatgttgcatgaagtgggattaagtatcaatttaagtggtttgcatcgtcattctgcttatattctttcgaatacagatttacccggttttaatcaagaacaacaacaattattaactacattagttcgttatcatcgcaaagcaattaagtttgatgagttacctaaatttaatctatataaaaagaaacagtattatccattagtacaaatacttaggttagcaacactacttaataatcagcgtcaatcaaccactaaaccggtttctttacgtttagtgaccgatgataatcactggacactctattttcctaaaaattatcttgccgataacacattgatggaattggatttagaaaaagaacaggagcattggcaggccgttccgggctggaaactggatataaaagaggaatctgcttaacaatatgatattatacagaaaaagacgcggtataatgcgtcttttgttgcatttatcatacaacaactatcacataacaacgtaaggtttgatttgtgacgataatatgaaaatacccaatgtaatattttcaagatcgctatttttttatatggagaagaccgataatcatcctaaaatggaataatgaatactaatggttatctccctcgtaagaattaaaaaggaataacatgtctcaatcagctatcaataatgatactgcggctgccatcaatccatattcacaaaaagtggcacacctgcgtcagcaaattctgaacatctttcttgaagatgaccgttttgttgaaacagtgttaggtgaagcaagtgaaagtgataggctgagccaccatgaacttcatgaaaaaatcaccactgttagagaattactacaagatctacacgcggcagatattgcagatattcttgaagcccttccctatgatgaacgtttagccctatggcatttggttgataataatgagcgtggtgcggttttagtcgaagcctctgtcgccgtttgggacagcctaattaaagatatgacggatcgtgaattattacgctcagtcgcttctttgcatgtggatgaacaggcctatattgcggagcatttaccccgtgataccatgcgtcgtcttttgacctatttagaaccaagtctgcgtaataggatcagagaagtcctgcaatatccgaaggatagtgttggacagatgatggattttgagtttgtcaccgtgcgtggcaacgtaacattaaaaacggttcaacgttatttacgccaacgtggctctattcctgaagctacggataaaattttcgttattgataatgccaatcatctgttaggtgaattacccttaaccacagtattaacccagtcgccggataaacgggtctctgatgtcatgaaaaccgatactgtcagctttatgcccgaagagaaaggcgaagatgcagcgggtgcattcgaacgttatgacttaatttcggctgcagttgttgatagtaatggcctgttaatgggacgtttaaccgttgaagatatcgtcgataatatgcatgaagagagcgataccaacattcgtcgtatgggggggttaagcccagaagaggatgtattcgcccctgtcgggcaagcggttaaaacacgttggacatggcttgctatcaacttatgtactgcttttgtcgcttctcgtgttatcggtgtgtttgagcataccatttcccaattagtcgccttagcaactttaatgcccattgttgcaggtattgggggaaataccggtaaccaaaccattactatgattgtgcgtgcattagcactacatcaaattcagactggtagtttctcgttcttaattttaagagagttaggtgttgcccttatcaacggtattgtttgggggggaataatgggagttgtaacttacttcctttatggtgatgttgcgatgggcgccgtaatgacaatggccatggtactcaacctattaatggctgccttgatgggagtattaataccgatgaccatgataaaactgggtaaagatccggccattggctcaagtgtgatgatcaccgcgatcaccgataccggtggcttctttattttcttaggcctagccactattttcttagtttaacaagacagataaaaacgccactgtagagtacatcacagtggcgtttttgtttttatagattttttaggctgttgttgaaagaaagtaatagaccagtagtaatgcgacaacaagcgataccataaacgttcttcttaccgcaacactgactgataaattatcttgttgcagactcccatacagcgttttttttagtagcagactactagctaaagcgacaacaaacacagatgcaaatagcacaatcgcggctaacaacaccgcacttatcgaaattgaattcatcattcccccctgctatatccaccgacatctgatgtaattataaccagataatgacgctttgagatgatttttgctgtttttccctatttatcatttaactatttaaaatctatattttaaataaaaatgcgtaaccatgcttaaatcaaccaattttattgacatttaatattaataattttcaattttaagaaatttaaaaccaatgaataaatgagtttattttagatgaataccctaaaaataatgccaataacaggttatattgctacaaaacaccaatatttattaattaataatctaattattatttaattaacaagaaataataaattaaaataacgctaattttattatttaattcaatttagaaaaattgaaatgatattcaataaatagtttttttaaccataactaataaatgaaaataaaggtaagaacaaaacctctaattttattaaaaaactacacaagaaaacaaaaaccgccctaaaaatcacaaaacaaacaaaacttagcattaaaaactacagatgctcacaatgacaacttatcaaattgttttattttatgctctttacttcataaagagcttcctgatataactatttacatcattacaatattattctttcttgtataaaagacgataaataactttttaacgttatttattgccacctttgtgatcaacttttttaagaattttattgatggtttagttatttactcttttttatcacgatgattaatataggttgttattatgacatcacaatcacactccactcagccgttgagtcaacctacggcaagacctttaaaccgcaacgactataaaacgttgggtttatcctcactaggaggaacattggagttctatgatttcgtgatcttcgtgttctttacgaaaacattgagccatttattctttcctggtgataacgcttttatcgctcagatgcagacattaggtatttttgctgccggttatcttgctcgtcctttaggtggcatcattatggctcactatggcgatattatcggccgtaaacgtatgtttaccttaagtatctttttaatggctgtacctactttggtgattggcttattacctacctatgccagcatcggtgtggctgcaccgttattactgttattgatgcgtattatgcaaggggcggctatcggtggtgaaatgcccggggcttgggtatttattgccgaacacacaccgaaacagcgttatggcttaggggtgggtaccttaacatccggtattactggtggcatcttattaggctctatcgtcgctattattgtacaacgcagctatagcgctcaagaagtgaatgattttgcatggcgaattccctttattttaggtggtatatttggcttgatctcggtttatttacgtcgttttttacaagaaacacctatctttaaagagatggcggctaaaaaagccttagcacaagaaatgccggtggtttcggttatcaaaaaccataaacaagcctgtttaattactgcagcattaacatggtctttatctacagctattgttgttactattttgatgacacccagtgtcattgttgaagggatctacaaaatagacagaacaacatcgttagaagctaactgtgttgccaccttaacgctgaccttaggatgtatcttctggggctggttgggggataaattaggaacccgtgcatccatgaccttatcatggggtggattaattgttactgcattccatttttatggaagcttagatgccaatatgtctggtatccaattagcatttaactatggtttgatgggcttttttgtcggtgcaattgccacaacgccaattgtgagtactagagcatttcctccttcaattcgtttttctggtctctcttttgcttataatatggcctatgccgtatttggtggcttaacgccaatgttaacgggcgcttggttggaaaaaacggcaatggcaggagcttattatgttgcagctgtttctgcattagccattgttatcgcattcttgcctttagcttataaaggctggatcgcggtaaacgccagctcacgggaaaaagagatagcgttgcaagttgataaagtcgctagttaatcgttgctagcaagaaatattttactctccttagaatttattattcacaacaacaccaccctaataggtggtgttgttgcatcaatataattaatctaatcactgtagtttatctgaatttaatcttgttatatatcaatcaattgataatacacaatttgctctttaccctgttaaagaatatttttatatcgcagggagtgcttaaagctaaatggttaacaaaaaaaatttgcataaagaattggcacaattagaagccgaaggtcatatcccctataaaatccaagaggaaaaccagcaaaaaagatggcaatggaaacattacacgtcaggagtgcactattttgcacctacagatccattagaaatgggtcgctacaatgatccaacaggcataacgggaatatgctataccgctgattatgcagttgtagctattgctgaatcattaggacgtcactatcaacataataaagcttttattttaggtcttagtgatctaaaaaaagctcagatatacacacttgcaactacacgtaaaacaaaacttattgatataccaaagttacagggcatattgcatatcactgcagaccaagtcatggggaaaagttatgacattactcagaatattgttgattgggcagccaataccccagggcttgattatgatggtataacctactcttcaaggcattactatggaatgtgtacagccttttggtgtagaaaacatattatccctcctcttgttgatatttctcactgctcccttgatttatacacagattgtaaaaaagaaaattttccgcaaaattggccctatcaagacattacaggacttgagatcattactgaaacattacattttaagatcaacgataatgagtagatttttattagtttgaaatatgttttccaaaaagtttagcttgatgaataatttcttgcatttgttcactcatgcgtccatattttttaagcgcatcaataacattaatatcttgttcatcctcaaaaaaatacatactcgttaaaaatgatacttttgttgttgagcttaaaccatccaataaaattaagatctcatctaatccatccactaatcgattaccatcaaattgaaaaataggtaatcgatattctcctcccattttaaccgctaatagtttattagcctttaaccgattattaatcgtttgacgttttactcccaaaatagctgcagcttggctagctctacatgtgcctccaagctcttttagccgttcagaaaacttaatagcaccttcgtttaaacgggctattttacgttgttctcttggtgaaattgcagacgaacgtatcagttgagtttcaaaaattaactgagccaattcgttatcactcatttttaaagcacttgctaaacttttcttctctgctaattcattaaccaattcttttgtaagaacagtcattctttctagaacagccactctctctaccgataattgttgtgatgttcgtttttgtattacgctgttcatacccacctcttttttacattttattcattatatagtgagtaaagtgtataaaacaagtataaataaaaaacaacattatcaagtactatagatattttttgttaaaattaactttatttttaaatagatataaaaaaggatgccctaaggcatccttttattgtctgacaataaatttcacatattactgtgtcattttactcagcataggggcagtaaatagcattaacagtgcaataacacctgttacgatacctatttgtaaaaatacactgctataaatttctaatgatgcgtgtgcattttgtacgtcttcaggaacggccattaagcttgccactttaccagcaataattgcagctgccgcagatgttaagaaccatgcgcccataataaagcccattaaacgctgtggcactagttgggccaccatcgcaagacctaatcctgagatcataagctcaccaatactttgaaagccataactggcaacaagccaccatgatgaaacgatgccagcttcatttgccatactcgcccccaatggtaatactaagaatgcagttgcactcaaaaacattcccactgtgaatttataaggcatgggtaatttatcacccataaagttatatatagcagccaataatggactagctagcatgatccaaaatgggttaagtgattgaaattgctctggctcaacactaaagcctaaaatagcgtgttcaacattatggattgcaaaaaagtttaatgatgttggcatttgatcataaagaacaaaaaataccacggcttccaccatcagtaagaaagcgacgatcattttacgccgtgcaacccctttcatcataaaagtttcacgggcaaaaatcaggataatacctaatgaaataatcgctaaagaccatgttgccacttcattattatgtaataaccacgttgatactgccgttaaagcaacaatccccaccagcgttaataacagtttcaggtagtttagtggctcaaagtcaggcctagagcctttatctttgatccaaccgcgacatagcataaagtttgccagtgtgatcaacatccccaccacacttaatgcgaaagcgacatcccaaccataattcgccgctaaccatggtgtcgctaacatggataaaaatgatcccacattaatcgacatatagtacatggtaaatgcaccatctaattgtggatcatctttctcataacaggtggctaataaagaggaaggattggctttaaataaaccattacccaccgcaatagtggctaatccccagtaaatcatatctttatcatgatcggagaaagcaaccatggcataaccaattgccagcacaatagcccctaggacaataaccctttttgtcccgagaattttatcgccaagccagccaccaattgccacaaagccataaactaatgcggtaaatgcggcaaaaacagtgatagcttccgcctcactcatacccagcattttaaccagataaacggccatgatcccttgtaagccgtaatatccaaaacgttcccataattcgattgagaagatgagataaaatgcacgaggctgtttaaacgcattcagactcggtttctgttcatcttcaggtgtgtttgcagttgacactaaaaacctctagttattctattatgcccttatttttgggctgcttttaccaaaaacattgtgattcaagacagagttaaagcgcggtgttattcatactgaattgttattcttaacaaagagttcaacacagagaaaaacaaggttggcattctatcaccggaaagaataattatctaagaattataactaactattgcgttttatcatagttgacgccatttgtacaaaatagttatgcgttcaaaaaatcaacaaacaaaataactcactgattattaatcatttattttatgctggtttattcatcatcatcactatataaaaataaagtgcgccgagatagctagctagaaatcgttttttctctttataaaaagatataaccccagcatattattgctaagtgacaacaactgattagaatataatcaataaacacattccttgactcaattttcatatttcctccatttttacccctaaagaaataggtagaatgtcataattgattgtgtcatttcattttttctcaattagcgagttgtcagtaggatcaccaacgcaatgaataacaacaaaaagaccaaaaaaagattttctcttattatcatcctgcttattgttatcgctggcgctatcgcctattggcaatactcttcaaacaacagcgcacctcctgtgagtaaagatacccctactgcgaatacaccaaatagaagtacagctggctcaagacgaccaccgatgcctcctgtacaagtggcgacatctgcacaagaagatgtgccgcaatttttaactgctttaggtacagtgaaagccgtcaatagtgtgaccgtgacaagccgtgtggaagggcaattaatggcgttgcatttcaccgaaggccaacaagtgaatcaaggcgatttgttagcagaaatcgacccacgtccttttgaagtgcaattagcgcaagctaaagggcaattggcaaaagatcaggccacactggcaaatgcgcgccttgatttagctcgctaccaaaaactggcaaagacccatttggtttcacaacaagaattagacaaccaagcggctttagtcaaacagtctgaagccagtattagtatcgataaagcagcaattaataatgcacaattacaattaacctatagcaaaataacggcccctatttcaggacgggttggattaaagcaggttgatgtcggtaactatatttctggtggctcatctacgccaattgtcgttattaatcagatggatcctgttgatgtgctctttacattaccagagcaagatctatcacaggttatcttagcccgtaaaaataaccctacattaccggttattgcattagacagaaataataaaattgaattagcacaaggggcactatttagtgttgataatcaaattgatgccactacagggactatcaaattaaaagcccgttttcctcaacaagaaagtacgctatttcccaatcaatttgtcaatattcgtttatatgtcactacattagaaaaagcggtagtgatccccaatgcagcattacaaatgggaaatgaaggacactttgtttgggttgttgatgaggaaaacaaagtcagcaaactcgctgttgaggttgcatcacaaaatgcagataaagttgtcattgcctcagggttatccgctaatcaacgtgttgtcaccgatggtgtggatagattaacgcaaggtgccaaagtcgagattgtaacaccgctggcacctaaagctaaaaccactgatcccgttgttgcggagaaagcataatgagcgaaaaaatccccgctacaggtggtgggccatctcgtttatttattttacgtccagtggcaacaacgctgtttatggtcgcgattttattagcaggaattgtcggttatcgtatgctgccagtgtcggcattacctgaagttgattatccgaccattcaagtcgtcacactctatcctggggcaaaccccgaggtgatgacctctgcggtaacagcaccgttagagcgtcaatttggacagatgtcaggcttaaaacagatgtcctcacaaagttcaggtggggcatcagtcattacactgatgttccaactcacattaccgttagatgtcgcagagcaagaagtacaagcggccattaatgcagcaactaacttattacctactgatttaccttatccgcccatttacagcaaagtaaatccggctgatccgccagtgctaaccttagccgtcaccagttctgtattgccgatgacacagctacaggatatggtagaaacgcgaatatcgcagaaaatatcgcaagttaacggcgttggtttagtctctttagccggcggacaacgccctgctgtgcgcgtaaaattgaatgcccaagctgccgcctcttatgggttagatagtgaaacaatccgcgtggctattaataatgccaatgttaactctgccaaaggtagccttgatggccccactcgctcggtaacattatccgccaacgatcaaatgaaatcattagatgattatcgcaaactgattgttagctataaaaatggcgcccccatccgccttgccgatattgccaccattgaacaagccccagaaaataaccagcttggtgcttgggccaataatcaacaagccattattatcaatgtgcaacgccaaccgggtgttaatgttattgaaacaacggataatattcgtaatttattaccggatttagtgtctaatttgcctaagtcggtaaatgttgagatcttaaccgatagaaccacgactattcgggcatcagtgaaagatgtccagtttgaactgggcttggcgattgcacttgtggtcatggttatctatctatttttacgtaatggtgttgccactcttattcctagcattgccgtccccctctccttagtgggtacttttgcggtgatgtatttttgcggtttttctgtcaataacctcaccttaatggcacttaccattgcgacaggctttgtggttgatgacgccattgtggtgatagaaaatatctcccgttatctagagcgaggagataagccgttaaccgcagccttaaaaggggcgggagaaatcggctttactattatctcactgactttttctttaattgccgtactgatccctctgttatttatgggagatattgttggtcgtttatttagagagtttgccattaccttagccgtggcgattttaatttccgcggtagtctctttaaccttaacgccgatgatgtgcgcacgcttacttaaaccagaaagtcaaattaagcacaatcgttttgaaatggcttgtgagcgcttttttgaaaagatgatcgccgtgtatgcggtttggttaaaacgtgtattaaatcatcaatggataacattaggtgttgccctcagtacattagcattaacagttttgctctatctatttatccctaaaggctttttccctttacaagataatgggttactacaaggtacaatagaaacctcacaatccatttcttatcaagcgatggttgaaaaacagcaacaagtggttgagaaactgattgacgatccggctgttgaaaatattgcgagctttgtgggtatcgatggcagtaatgccaccctcaatacaggtcgcttgcaaattaccttaaaacccctcgatcaacgtgattcacgtattgatgaaattattcctcgtttacaagcacgagtcgcgtctattgcaggaattacactctatttacaacccacacaagacttaactattgatacacaagtttcccgtactcaatatcaatttaccttgcaagcaacctcgctcgatgagcttgcctattgggtgcctaaattatcacaggcactacaagagagtccggaacttaccgacatcagcagtgattggcaagctgatgggatgatggcctatatcaatgtagatagagattcagccagtcgcttagggatctcaatgagtgccattgataatgcgctgtataatgcctttggacagcgacttatttcaacgatttacacccaagcaaatcagtatcgtgttgtcttagaacagaatatgcacaatagtgaaggactacaggcactttctgcagttcatttaaccggcaaagagggtgctatggtgccactcttatctattgcctctgtggagcaacgtctcgcgcctttatctatcaatcaccaagagcaatttcctgctaccacattctcatttaatgtcgcgaaagacgcatctcttgaagctgctgttaatgccgttaagcaagcagaagagcaaattgcgatgccaaaagatattacgacacagtttcaaggggctacattagcttttgaaagcgccctttccagcacgctgtggcttatcattgcggccatcgttgctatgtatattgtattaggcgtgttatacgaaagttttattcacccaattactattttatctaccctacctactgcgggtgtcggtgctttattggcactgatggcagccggtaatgagctagatattattgcgattattggcatcattttgttgattggtattgttaagaaaaatgccatcatgatgatcgatttcgcactggccgctgaaagagaacaaggactatctccttacgaagcaatttatcaagcttgtctgctacgttttcgccctattttaatgaccactatggctgcgttattaggtgcattacctttaatgctaagcactggcgtaggggctgaattacgccaaccattaggtgtatgcatggtgggaggcttaattatgagtcaaatactcaccttatttaccacccctgttatctatttgctgtttgataagttatcactttaccttaatcgccataaacgcgttgaacatgataatggagcggtgtcatgaagctgtttgctctatttattcaacgacctgttgctactacactacttagcctagccatttctctttgtggtgcgttaggttttatgttgttacctgtcgcaccactgccacaagttgattatccggtcattaatatttatgcctcattaccgggggcatcacctgaaacgatggcttcttctgttgccactccccttgaacgctccttagggcgtattgcggggattgatgagatgacgtcaagtagtgctttaggtagtaccagtatcacattagtatttgacttaaataaagatattaataccgcagctagagatgtacaggctgcgttaaatgcctcacaaagcctattaccttcaggtatgccaagtcgcccgcgttattacaaatcaaatccttctgatgcaccgattatgatcttaacgctgacctcagagacacaaaataccggtgagctttatgatctcgcatcaacacgcttggcacaaaaaatttcgcaaattgaaggagtaagtgaagtttccgtagggggaggttcattgccggctgtgcgtgttgcactcaatcctgatgcgctatttaatcaaaatgtcagtcttgatgatgtacgcaaagccattagtcaatccaatgtcagaagaccacaaggctttattcataatgatgaaaatcgttggcagatacaaactaacgatgagttaagcaaagctcaagattatcgcccaattattgtgcattataatcaagatgctatcgtgcgtttaagtgatgttgcccaagtgacagactctgtacaaaacgcacgggcggcaggaatgagtggtggtgaaccggctattttactggttattcgccgtgaagcaggcgccaatatcatcgaaactgtcaaccgcattcgtgatgaactccccgaattacgtgagctactccctgccagtgtcaatttaaaggtagctcaagatagaacccccactattcgtgcctcgttagcagaagttgaacgcgcattagcgattgccgtggcactggttattttagtggtattcttatttctacgttcagggcgtgctaccttgatccccgctgttgccgtacccgtttcattaattggtactttttcagccatgtatttatgtggctttagcttaaacaatctatcattaatggcattaacggttgcaaccggctttgtcgtggatgatgcgattgtcgtactcgaaaatatctctcgccatatcgaaaatggcttaaaacctaaacaagccgccctaaaaggggttagcgaagtgggctttacggtactttcaatgagtatttcattggtggcggtatttattcctctcttgttgatggatggccttgtcggacgactttttaaagagtttgccattaccttaaccaccgcgattgggatctctttatttgtctccttaacattaaccccaatgatgtgtgcccatttattaaaaggcataaaacccaaagcacagtcacatttacgcggatttggtaagttaatttttcgcttacaacaaggttacagtgtcacactacaagcggcattacggcataaacgctggatcatggctatttttattaccaccttaggactgaatgcttatttatatatcagtgcgccgaaaaccttttttccagatcaagataccggtcgtttaatgggatttgtacgtgcagaccaaagtatttcattccaatcgatgaaagaaaaaatgacccgttttatgcaggagattaatgcagataaagatgttgatagcgtcacgggatttacggggggaggacgtattaatagtggatttatgtttatttcacttaatccgctctcagagcgcacagatagtgcaaatcaagtgatcaatcgccttcgtatcaaactggctaatgaacccggtgcaacactatttttaatgcctgtacaagatgtacgtgctggaggacgccaagctaatgccagttatcagtttactttactcgctgatgatttaagtgaattacgtaaatgggagccattaatacgtaaagcgttaggcgaattacctgagctggttgatgtcaactcagataaagaagataaaggtgccgaaatggcactcacttatgatcgcgatactatgtcgcaattaggcattaatgtcagtgatgccaataatttattaaataacgcctttggacagcggcagatctctaccatttatgccccgctaaatcagtataaagtcgtgatggaagtgtctgaacaatatacgcaagatgtttctgcactggataaaatgtatgtgatgaatacacaaggtgaacgtattccattatctgcatttgccagttggtatcccgctaatgcacctttaagtgttaatcaccaagggttgtctgccgcctctaccatcgcttttaatgtgccagagggctataccttatctgatgccattaacgccattgagcgaaccatgacagagttaggtgtacctaacacggtacgaggcacctttgcgggtacagcgcaaatttttcaagaaaccattaagtcacagcttatcttgatcttagcggctattgtcaccgtctatattgtccttggtgtgctttatgagagctatattcatccattgactattttatccacattgccttctgccggtgttggcgcattattagcactgcgcttgtttgataccccctttagcttaattgctcttattggcattatgttgttaattggtattgtgaagaaaaatgccattattatggtggattttgcgattacggctcaacgagaaggaaaactatccgctcaagaagcgattattcaagccagtttattgcgtttccgccctattattatgactaccttagccgcgctctttggcgctttacctctgatgctaagtagtggtgatggtgcggaattaaggcagccattaggcattaccattgtgggtggcttgcttatgagccaattattaaccctgtataccactccgattatctatctgttttttgatggtgttcgccaacgttggcaacagcgacgccataacaaaaaagaggcaaatgcatgaaactaagaagtaagctatttttggtgatcttcgcgacttgcatgatagtggtatttgctatgcatatcggtattcgtagtagcttccagcaggggtttattggctatatcaagaaaaacagtgaacagcgggcaaccttgttagccgaagcgttaagcgatcaatatcaattaaccggagattggcgttttctcaatcgagacgatcgctctatttatcagatactacgaaccattgaccaaataagtcaaagtggtgaaggccctgcccctcgaggatggcgtactcagttttggatcgtcgataaacagatgaaacgcttatttggccatgataatcaatttcccgcagaaacctttaaaaaacctattacttatcatgatgaaattgtcggctgggtgattgtcagtgcagcggataaaatcagcaacgaagcagatattagctttgataagcaacagttacgcaccagttggatcattgccggcttaacggtgctttttgcgctattaattacgttaatactgtcacgcagcatgatccgcccagtaaagcgattagtggaggcaacccataaattagccgctggcgattttgctgttcgcgtgaccccaaccaataaagatgaaatcagccagctagcaacggattttaatcaacttgccagtacactggaaaaaaatgagcaaattcgccgtgattatatggcagatatctcccatgagttacgtacgccattggctatcttaaaaggagagcttgaagcgttacaagatggtgtaagaaagccaactgcagaaacgttaaattcattactctttgaagtaacaaatttaactaaactggtaaacgatctacatcagttatcattatctgatagaggctctttgacctatcgtaaggattttattgatattaatgaaattattttgttagctgtcgcctcttatcggcatatttatcaagccaaagagattgctttacagactgatttagatgataacgtcaaactgattgttcaagctgatccggataggttgatccaactttttcataatctattagaaaacagtgttcgttataccaattctggtggtcaattgcatattagtagcaaaagagaacataataatgtgttgattgtgtgggaagatagtgccccggggctagataaagcacaatatgaagcggtattccaacgtttttatcgggctgaaagctctcgtaatcgttccagcggcggctctggtttggggcttgcgatttgcgaaaatattgtcgaagctcataatggtaaaatcatggctatgccatccgctatcggtggagtaaaaatacttatcgtattacctgtctattctgaagataattaaattttgctctattgattatactgaatattattgtcctaattgataactattgagccatatagacaatgaccacgaccacatctacatattcaattttaatcgttgaagatgagccgaaattggcacaattacttattgattatcttcaagcatctgattatcaaacgcagtggctggcagatggtactgaggttatacaacatatcaaacaatctcattacgatttagtcctgcttgatctgatgctaccgggtaaagatggcattaccctatgcaaagagttacgtcagttctccgatattcctattattatggtcaccgcaaaaacagaagaagtagaccgactattagggttggaaattggtgctgatgattatatttgcaaaccttatagccctcgagaagtggttgcccgtgtaaaaacattattgcgtcgctattatcggccacaggatattgtgcaaaatagcgccttagttattattgatgagcaggcttaccaaattcaatatcataataaaattcttgatttaactaccgctgaatttcgtcttattaaagcattagctacacaaccgggcaaagtgttaagccgtgaccagttaatggatcatctgtatgatgattatcgcatcgtaaccgaccgtactattgatagccatataaaaaacttacggcgcaaacttgagcaacttaacgatcaaattgaatttattcgttcaatttatggacaaggctatcgttgggaaaccgcagcctatcgttttcgatgatattttttcaggaatacattgaacctcgctacagttaagcgctagaatcctcccctttatgatatacccttaccttttgtgtaggggactgacttgaaatcagaaccaggaaattaatcatgtttacacccgaattgctctctcctgcaggctcattaaaaaatatgcgctatgcattcgcttatggcgcagacgcggtctatgcaggtcagcctcgctatagtttacgcgtacgtaataatgagtttaatcacgaaaaccttgctaaaggaatacaagaagcgcatgaattaggtaaacgcttctatgttgtggttaacatcgccccccataatgcaaaattaaaaacctttatccgtgacttaaaaccagttattgatatggggcctgatgcgctgattatgtctgatccgggtttgatcatgatggtgcgtgaagctttccctgatatggatatccacctttcagtacaagctaacgccgttaactgggctaccgtaaaattctggcgtcaaatgggcttaactcgcgttattctttctcgtgagctatctattgacgaaattgcagaaattcgtaaacaagtccctgatatggagcttgaagtcttcgttcacggggccttgtgtatggcttattcgggtcgttgcttattatcaggctatatcaataaacgtgacccaaaccaaggtacatgcacaaatgcctgccgttgggaatacaaagttgaagaaggcaaagaagatgaagtggggaatatcatcgagaagtaccaacctatcccggtaaaaaatgttgagccaacgttaggtgtaggtgcccccactgataaagtgttcttaattgaagaagctaaacgtccgggtgaatatatgactgcgttcgaagacgaacacggtacttatattatgaactcaaaagatctgcgcgctatcgaacacgttgagcaattaactaagatgggtgtacattcactgaaaattgaaggtcgtactaaatctttctattattgcgcacgcacagcacagatgtatcgccgtgctattgatgatgctgttgcaggtaagcctttcgatccgacactgctgacaacgctagaaggtttggcacaccgcggttataccgaaggttttttacgtcgccatacccatgatgcctaccaaacctatgaatacggctattctgtatcagatacacaacagtttgtaggggaatttacaggtaaacgtgttaacggtttagctgaagtggatgttaaaaataaatttatcttaggtgatagcttagagctaatgacaccaacaggaaatattcaattcactttagatgcgttatttaataaaaaacaacaaccgacagatgttgctccgggtaatggccatgtggtttatttacctgttcctgacgatgttgatttaaactttgcactgcttattcgtaatctgccaggaacgacaacccgtcaacctcataaaattgatgcggtagaagtgaagtaaatcatcattatctgatttgatgtggtcaatttcaaagatagatcacatcaatacctattcatttgccgtattatctatttcgaaaaataaagaactagaatgaatacagtaagactaggaaccacctccttggcaaatccaatctcccttggatttgccttttctttttttatcccccgctatttttattattattttttgagtaacgtaaattgcttttggctttggtgatactttgtaaaaaaaatggtaattcgcctaatatccattatctttaaataagtcatattaattaaggagtcatattgatgggccaaatcagtttgctgattatcaatggaaaaaactcaggcaatgaggctctgcgacaagcggtttatcaacaacgcaaggaaggtaatgatatccaagtcagagtgacatgggaatcaagtgatattcaacgctttgtgcaagaagcactacatattcaagcgcaaaccattatcgccgcagggggtgatggtacgatcaacaatgtcgcctctgagctggttcgtttagccccctcttcgccccccgcgttaggcattatccctttagggactgcaaatgattttgccaccagtgcacaaatcccattagagatggacaaagcgctcagtttagcgattaaaggtcgcgccgttcctgtcgatattattaatgtgaacaaaacacattactttatcaatatggcctcaggaggctttggtaccaagatcaccactgaaacccctgaagcactaaaatctgccttaggtggtgctgcttattttattaatggtttattgcgtattgataccttaaaagcggatcaatgcaccgttgaagctgaaaattttcattggaaaggtgaagctttaattatcggtattggtaatggacgccaagcgggaggtggacaacaactttgccccgaagcactgattaatgacaataaactcaatattacccttgttgaagcccgtgaattgcttccttctctattaaccagtctgttcgatcgtaagaaaaatgacaaaattattgagcgagaaagtgattgggtcactattagtgcggctcatgaaatggtatttaatttagatggtgaaccccttttaggggataaatttgaatttattgtactacctgaagcgatccactgccggttaccgccccaatgtgacttgttatcttaatgtagataaatgacaatcactatcatctcatcgtgaactggagtaagtaatgactgatatagtaagtttgttaggtgctgatgctaactcattattggaacatcgctgccaaaccatcccaagcgaaaatctctacctgccaggttctgactttgttgatcgtgtgatgattgataacaatcgccctaataccgtattgcgttctatgcaaaccctgtttaaccatggtcgtttagcaggaacgggttatctttctattttacctgtcgatcagggtgttgaacactctgccgctgcctcatttgccgcgaacccactctattttgatcccaaaaatattgttgagcttgccattgaagccggatgtaactgtgttgcttccacctatggtgttctagcttctgtttctcgtcgttatgcacacaaaatcccatttttggtaaaacttaatcataacgaaacattaagctatccaactcaatacgaccaaacgctatatgccagtgttgaacaagcctttgaaatgggcgctgttgctgtaggtgcgactatctattttggttctccagaaagccgccgccaaatcgaagagatctcgatggcatttgaacgtgcccatgaattaggcatggttaccgtattatgggcatatttacgtaatccagcctttaagaaagatggggttgattaccatgcaagtgctgatttaacaggtcaagctaaccatttagcatcaaccattggtgccgatattgttaaacagaaaatggctgaaaataacggtggctttaaagcgattggttttggtcatactgatgagcgtgtttacactaaactgacgagcgaaaaccccattgatttagtgcgttaccaattagctaactgctatatgggacgtgcaggattaattaactcaggtggagcatcgggtaataatgatcttgctgatgcagtacgtactgcagtcattaataaacgtgctgggggcatggggcttatcttaggtcgtaaagcctttaagaaatccatgaaagacggtgttgctctaattaatgccgtacaagatgtctatttagataaatctgtgactattgcttaattttttacgattaaattacgcattgaagcccctttaataggggctttttgatatcaccaccagcgatgaaaatgatgtacagggccgaaaccttgtcccacctctaaactgtctgcctgttctaacgcttgctgtaaataggcttttgcttgttcaacacaactttgccaatcagaaacttgaggacgaatagcagctaaagcggctgaaagtgtgcatcccgtaccgtgagtattttttgtattgatgcgcggtgaagtaaatcgccattgcccatcttgggtcaataaccaatcaggactttctttctcgcttaaatggccccctttcatcaataccgcctgacaaccttgataaagtaatgcttcaccttgttgtttcatagttgtttcatctgtcgcgatatcacaacctaatagtgctgccgcctcaggcagatttggcgtgatcaaatcaacgcggggtaataactgagtgaacattttatcaatagcatcaggttgtaacagtggatcgccgcttttggcaagcataacagtatcaagtacgacaaaaggaatgggatattgctgcagtttatcgcaaacgacatcaataatactggcattagaaagcataccaattttagcgctatctattctgacatcagaaagtaccgcatctaattgtgctgcgacaaaatctggggataaatcatagacagagtgtacaccacaggtattttgcgctaccagtgcagtcatgactgttgtgccatatacacccagtgcggaaaatgttttcagatcagcctgtatccccgccccaccactcggatcggtgccggcgatagacaacgcgttatatctcactgattaactcctcctttaccagttacagaaaagtcgggctctgttaatcagcacagtgaccttgacttccctacgctggcattatccagatcaggttatacgggttcatctcagccaataggcgccccgagccaaagcttatatgatataagccacaagagtatcgcatgcagaagataaagaagctagtttgatagtgacaacctttatcagctcacttaacgtgctttaagttaacttttctattttagaagataaattaatctagcttatctataatagaggcaggctcgatgatttatattttattagctatcaatcttgaatatatattctcaacataaaacaatgataagcataaaataaaatattttgctcattttaacgacaatcgatatataatctgctaaatgaggtatttataatgcatttcttgaccaccactgatatgcggaggggctaaatgaaaaatgaaccatcgcaacaacaaaatggacaatcaatgccttatcttattcctgatgcagattttaatgcgaaattaaaactaccagccaaaaatattgaacatacaatacaatttataacccaaggggtaaaagatatttctttagacggttttgaaattcctacgggctatcggttagttaaagctgttcatagagatcaatatagacttattactactaataaagaaagcgaaacagcctatttagttgaactaagatttcgacaagatatcgtttatggacaaacaacatgtactcaaataaaagtatggcgttctcgccttcctaaacatcgcaatgtaataagagatttaccccgcactttcttttataacctattaaaagtacacaatattgttgtgactgatgaggaacaaacctctgatggtaaaggtttttggattgatatgattttatgggcttttagtgaaggatattatatttatgcttcagatggcactgaaatggatcgaccattacatttaattgatagtgtggaagacttttataataaatgggatgcgttttgctgggaaaaagatcgcgatattcatactcatcgactattagttattagtaaagaaccgttatctcaataattaaacgattttttcttaaaatctgtgggttttcccctcgttactcataactcacagatttaccccttctttaggggtgctatagtgaagtgatcactttatccagcagccataaaacttaaacactttataaacacatcttcgttttttgctttttttatttaactctcattattaattactctattatcctgctcctttgcaattttgcccatataacaaacactattcattattaacgttatattaatatttcaatatgcgataaaaaaaccgatggatatgtaatcgttatattatgttataatgttttttagataatatttaatcgttattatcttgcttagtttgttttattctaaaatctaataaattatgtatcattattaagcttaataaatcctcaattatattaactaatactataaataattatcttttaaatgggagcaactgagatacatctctttgtaaccatttgaaattaaatataatgttattaaaatagttcaatttcggatagctcttatctgaatatttcactaattcaataacactatggcacaaatttttttaacattaccagaaccaccgcaatgccgtattcggagttatatatgtcatctacctattttcactctagcctattagcagctacactgttttcagttacgttaacagcacctgcttttgcttctgaaaatacgcaaaacacacctcagactattacgacaaaaaaacctcagccagcagagaacactttctcagaaaaaaatgaggaaagctattggggaaaatttaaacgtaatcttacccaaacttgggataatgaccaatataactactatttaccggtatggacttggcataaccgttttacttacgataaagaaaaaaccaatcgttataacgaaacgccttggggatttggtatgggtaaatatcgttatgataatgagggtgattggcatggcttatatgctatggcctttatggattccaataatcgtgtacaacctattatgggctatggttttgaaaaaatgtggtatcccggtggagatagagagggttttcgcatgggggcgggctttaccttaagtgtgactgctcgtcatgagtataactatattcctatgccattacctctaccgctagtgtcagtcggttatgaacacttatcattacaggcgacttatgtaccaggaacctataataacggtaatgttttatttgcttggttacgttggcagtgatcgattgccctaataaaaaataaagtgactctttttagagtcacttttttaatatcgcgtttttcttatctttcgcttaggctaacttagccaagataatttaactatcttgccttgcttgtgtggttgtcagcgattttttagttcttgagatcttaaaacctatccagagcaagcctacccaaaatggcatcaaaataacggaaatattaatttttggcatcattagaataatgaccaaaatcatacataaaaaggctaaacacagatagttaccataaggataccaaagtgctttaaatgaaggctctacaccctctttaattttagctgcacggaattttaagtttgctaaacagatcatgatccagttaagcactaatgttgttaccactaatgccattaatagctctaaagcttgatcagggagtaaatagttaaccaaaatcccgagtgatgtggctatcgcagataaccccaaagaaataacaggtacaccacgtttattaaccttagataatgaatgcggtgcattgccttgtttggctaaaccgtacagcatccggctattagaataaacgccactgttatagacagataatgccgcggttaaaaccaccgcatttaaaatatgggcaacaacaaaattatctaaattatggaaaataagtacgaaaggactttctcctttcaccacttgggtccaaggataaagagaaagcagtacaatcaatgaaccaatatagaaaatcaaaatacgataaacaacttggttagttgctttgggaatacttactttaggattttctgcttctgcggcggtgatccccaccagctcaagtcccccaaatgagaacatcacaatagctaatgcagacataaacccagtaaagccatgagggaagaaacctagctcccataaattgctcacagaagcttgcggaccaccattaccactgaccaataaatagctaccaaataaaatcataccaacgatcgccaaaacttttataatggcaaaccaaaactcggtttcaccatacattctgacattaattaggttaattaaattaatagcaacaaaaaacaccgctaccgaaacccacaccggaatatcaggtaaccaataattaatatattttcctgcggcggttaattcagccataccgacaagaataaacataacccagtagttccaacctgataaaaagccagcaaatggcccccaatacttattggcaaagtgactaaatgaacccgcaaccggctcttcggcaaccatttcaccaagttggcgcatgatcataaacgcaataaaaccaccaatcgcatagcctaatataactgatggcccagtcatattaatggtttgcgcgataccaagaaacagaccagcgccgacagccccacccagcgcaatcagctggatatgtcgatttttaagaccgcgctttaattctgcttgttgcgactctttcgccatacatcctcttttcttcatctatcaggtaaaagtgtaaatcaatgtttacgattttgtttatttcaagccaccattaaaacactaatctgacttgaataacaaatacattttgtgatagaggggaaaaagcatagaaagcgggttttttacggctgcttagaggggaataagatggtaaagcgacagataccttgctgaaaatcttcgccttgatcgcaaaaattatctaacgccacaaggtacaaccccaagctgatagctaatataattattaagctaataattattttctttgcgttcaaattaaaatcctttaaatacattttgttaatagtacttattacaaaataggcattcgctttaatacgataacaacgcctatcactgttgttataaaattcgcaataagttatctctaagattaaatttagcatagttttcataaagaaagttaaatgcttcctcgacagaaaacagataattggcactattttttcttaattgtacgcaaaataggcatttttattttaattacacattttgccaacacatagaaacagcaatcaactaatatggatttctctgtttgccactttttgtataatattaaggagttaattttgttttttaccttaacttcatcgatagaatggaactgtaatgccacaagataatcatctcgcattagtttgcgcgctaagtaaatggattgaggagcatttaggtcgcgtaatacaccttgaagagctagcggcttactccggctattccctttggcatatgcagaaaatttttaaagaagtcacgggcacctctttaggaaagtatattcgccaacgccgtttagcgggggctatccatcttttacgcaccagtgaccgctcaatatttgatattgcattagatttcggctttggctcgcaatcacactttacttatatgtttcgtaaagagtatggcatcactccatttgactttaggcaaaatcaaaatatcgagttagagacaaaacagcccttacatttgcaatcactttgttgtgattagactgacttttatgtggcatagagatattctctttcgtgtcacataaataaagccccagttatgtgatgataatacctcgcccttaccaaccattaactgctttactttaatatggggatgataatgagtattaagcttatcgttattgatttagatggaacgttactaaacgaacaacatgagatcacacctgaagtacatcaagcgatccaacatgctaaaaattctggagtgcatattgttcttgcatctgggcgatcttttaacggcatctctccctatttaaaagcactgaatcttgatacatctgataacttttgcattagcaataatggtagccaaattcaccaagcagaaaatggtgaaattatcaccgaagacttgctcaattttgaagattacctctattttgaagatctctcccgtgagataggtgttcactttcatgttttaagtgataataaaatttataccaccaatcgccatattagccattttacttgtcgtgaagcattcttaacgtggacacctctctattatcgccccttaagcgaaatgcaaagagatatgcgctttagtaaatttatgatcgttggtacacctacggtattagataacgcaatgcaatatttacctgctaatatctatcaacaatacagcatattacgtagcgctccttattttattgagatattaaataccgatgtcaataaaggaaacgcggtacaaaaaatagcagaacatttaaaaatcactccagagaaaataatgtgtattggcgatcaagataatgatttagcgatgttacagtatgcgggattgggtgttgcgatgggaaacgcccctgaagagatcaaaaaagtggcgaaatttattacattatctaataaagaacacggtgttgctgtcgctatcaataaatttatttaaacacgatattttttgtgttttatcactaatgtctacaaaattatatagcaattgtgatcctagctagaggatcacactgcttgcccccctgctttatagccatttattatgctccttttcctgctggatcaggattaaacacctatttcttcttacatctccgtcagaatttgttactatcaattctcttttcgttattcaaacactatttttacaagataattacctagtaattaggctaaatatagaataacaagtataaattattaatatattctctctcagacaggtagtattagttatgctttcaacaaaagacatgctagtccttggaatgatggtttttgctcttttccttggcgctggtaatattattttccctccaatggcaggtttccaatctggaaaccaatggtttagtacgtcattaggatttttggttacaggtgtcttactcccttttttaaccttagtcaccgtagctattcgtggacgtggtgaacgcctttctatcgacttgccatcatggtttgcggtgttattttggattgcactttacctgattgtcggttctacctttgcaatgcctcgggtcacgaacaccgcctatgagatgggatttttacctcttggtcttattgaaaaaaatactacgacccatctgactttcgcattaatatttaacctattaagtatgttctttatgcttaaacaaggtacgatgatcagtgccatcggtaaattcatgaccccagcgctcttaatacttctggttgtcgttggtattgctgtagtggctaaaccgctttcccctattgaagagcctaccggcctttatgcggtaaatggcttcttctccggtattattgacggttatcaaaccatggatgtgctatctgctatggcttttggcgggatcgtcgctcgtgcgttatataccaaagggatcaccaatcctaaacaaattggttttatcaccataaaagcggggatgatttcggttttactcttagccgccctttatttatgtttattctatttaggtgccacaagtcacgcagtatctgtttttgctgatccggcactaaatgccactaacggtggtcaaatcttctcacgctacgtagacgctttatttggctctgtcggtacttggttgatgggcgggattgttttattagccagtatgacaaccttagtcggggttactagtgctgcggcagactactttgcgacattccatcatcgtttaggctatcgcttctgggttgtagtatttacactgttaacgacgttagtctctacttttggtcttgataccttattacgtgtcactattcctgcattattaatgatttatccaacatcggtgacactagtcttactacaatttgttcgccataaactaaaatcaccgcgttttacttaccgctttacaatctgtgtcattgttttaatgagcctacttgacacattaaaacagttaaaatggctaaatggagatttattacaactatttagttacattccactgtctgagtatgggctaggttggttattaccgggtattattgcattcgcaatttcattactaattagtctcagttttaaagaaaccgacacagaaattgctacacctaatacagtaaaataaatccattatagcaactagccccaaagtaaatggtcactttggggctagtttttatccttaataacgatcaattatctgaatgttttattggctcagttgatggctgtatccacttagttcgatatttatcaattaacgccattaaaatagcttctgactgcgcatcaggaatacctttaatatcacttggtctaaaatgcatttgaaatgcgctaaccactttttgcgtttcaggatctaatatccctgttgttggtgtttgataaccatacttcgctaacaaggtttgaaaattagcaatatcaacaggctccgatgcagctcttcccgctaaatagaaagtaactgtttcatcatctggccaagcgcctattccttgtttcgctaattcagcccatgggaaaagtggccctggatcaactttgcgttgtggtgcaatatcactatgcccgactacattttgtggttcaataccatagcgttgaataatatctttcatcatcatagtaatggttgagagttgttctgcggtataaggtaaccactctcttaatgtaccctgatcgttataaccataattcactatctcaataccaattgaaccatcattcaaacctgcactatttccccactgacttagccctgcatgccatgctcttttatcttcactcactaaagcaaacacaaccggcttaccatcaacataatttggtttggtaggaattaaataatgactgcttacatttcccgaagttaacgtttttaacgattctttatcgtcaacggcggtgtagtgcataactaaaaattttacgcgattatcttgcccaggattattgggaacaacttgtgcaaaataatcccccctatcaataagctgaggttgctgaacacaacctgaaagcaaccccaaagtaacaagtaaaaagagactgtagcgactaaagatcattatccatcctgaatacattagactataaatttaaggctaaattgtagacaaaaaacccatattaaaaaatatgggttttgtattttggtttttttttaataattttttaatgaataccgtacttgctcaattattgcctcaccttttcacagcggactaacggctcattcggtaaaggctctttatcccaaataccttgctctatatcattttgtaattcagggtattggcgaatattgaaagtgggtaatacaccagcttgtcgctgttggttataatctttaattaacttcaaagcgacgcctgaaagtaaaataatggcaattaagttagtgacagccatcaatcccatcgagagatcagccattttccacactaacggcatttcagccaaagcgccaaacatcaccatcgccagtacagctgatctgagtaagaatagccctgtcatatgattgcggcctaaaaaaatcatattactttcagcataggcataatttgcaataatcgatgtaaaggcaaagaaaaaaatcgcaacagcaataaaagtactcccccaaccaccgacagttgacgataatgctagctgggttaactgaataccattaataccatcttgataattatctaacacacctgaagataaaataatcactgcagtcgcactacaaatcaccaaggtatccataaatacccctaacatctgaatataaccttgcgatgctggatgaggtgggtaaggtgttgcagaagcggcggcattaggtgcagatcccatacctgcttcattagaaaataggccgcgttgaataccttgggtcatcgcttgactaataccatagccaattgcccctgctgcggcttcctgtaaaccaaatgcgcttttaaaaattagcataaacacttcaggtaaacgttcaaaatgatctgcgacaacccaaaatgctaataataaataggcgatagccataatgggtacaaccagctcagcaacacgcgcaatccaacgtagaccgccaaaaataataaagccgctcatcaccaccagtccaataccaacatataatggatcgaaattaaatgctgatgcagctgcttgcgctattgagttagcttgtaccgcattaaaaacaagtccgaaggcaatgatgaggaaaatggcgaataatacgcccatccaacgcatattgagaccttttgtcatataataagcagggccaccgcgatagttaccttcatcatctttagttttatacaactgtgctaatgtactttctattaaggaagtcgccatacctataattgcaactacccacatccaaaaaatggccccagggccacctgcggtcagcgcaattgctacaccggttaagttacctgttccaacacgtgcagctaaacttgtacataaagcttggaatgaagagatacctgatttatctgacttatgactattttttaaaatagaaaacatatgaccaaaatggcggatttgaataaatcctgttcgaatagtgaaataaatacccacaccaaggagtaagtaaataagtacatatccccataaaatgttatttgcaaagttaattagccctgtcaaattaatccccttatgtaataacgtatataacctatccttacatcgctattgaaataaaaaacagataaacacctataattgaaccaataaatggcttatgtatgtctttatctcatatcaaaaatgattgtctaaaaagcgacttaaatgtaacacaagattatacgatatgtatattttttgtttatttttttattatttaatcattctatttaattatcttattaactagaaactttagcataacaaaataaaaaacctataaatatcatttagataaataattaaaacattctatattatataataaaataaatttactgatctacaaaatattgttaattgattatttaacaacatgctaaaagatgaaaaaaacaccaataagaattgattgccaaatatacaattttcattttaaagtgagatttaaatcaaataagtggatttattaattaaatattctcttagtagtaatgctaataagaatttgaaaagtgcattagcattataagaaatgcatagtgaaaaaataatataactttaacgaacggaattattattttttaacaaaatattaataactttactttaggggcaggactattacgaactctattaataaaaaatgttttaaagtactccgtttttcttctctatcttctttgtttttacttaaattttattttacttatttccattttctgcttatttattagcgccttttcccttttgtttccataacaatttaatgttgattattttttgattaataaaaaaatcaatattcacgtaaatttacttattaaccatttagttaattttatttataatacatttttccctggtgttgtattattttttgccctgtttccccaacagggcttttttttatccttatttttcattctgttagtgattactcaatcgtttttataaaaattaacttaaaaaataaaacataaaatagacaatattaacattttattaaaatttaattattactttatctataatgtaaaaataattgatataaataaaattgatctagatcaaatataaaactcgtcaaaattggttactaactcagggaaacattaaaaaaactaattttaaatataattaattcaatataataaatatgttaccttggctagctaaaaaatgtaccagtagaataatttatttaaaggcaatattatttactactaataactattagtaataaagttttttatccattatctatacaattgctttctatttctttttttaaaattttttaaaataatttcttttagttacttgcattactcatcgctctcttttactttactctcatataacaagggagaaagtacgatgggttataaccttgctgaacttacacaagaagaaaaagataaaattaatgtcaacctagccgcttcaggggttgcctttaaagagcgttataatatgccagtagtagctgatgcgatagcaagagagcaacctcaagctttacaaagctattttcaagaaagagtgaccttttatcgagcacgaagccaacactattctcgcttaccttttgagtcgaaataaataccgtgctcaatattaaaaaaagagataaacatttacgtttatctcttttttattttcaagtaatgatataaaaaatgggcgaaaaatcgctattttttatcagttaaatgatactatttacttgatatataggtaattttattctcatcacaattaacttcaacattgtaacgtagatcggtacgagcacctcttacatccaagataacatgatagctattatctcttttgataacatcgttcgcattaatattcgccacaggttttggtcctagcgcttttttatcatcctgccagcgaggtaatcgattgagtaaataatcatttttcactctagtggcaagttgttctttatcaagattaacacaactagcaaaaggggctgagcgcacaacattattatcattattcacatttgtgacactttctgcagaggctccaaaagaaaccgcaagaaaaaaacctgcaccaagtatccctgtttgaccaactaatttgcttaatttcataataacctcccgaaaatatcccttaaagcaggacgagtttctattaagcatagcataagcaaaacagggtatttgtgacatttgttaaaaaaatgttttaatcattgtcatcgtcaaacacaatagagactgattcacgagtcgtgtgtttttctcttaattcttgagcgaccaattggatcgcctcaccactactcataccttcggacatcagatgttgaattttttctactgctttttgttgttcttcatgtgttaatgtaggcattcctagaaacataatgttactcttatcttaatcgatttctatgttggtctttacaataatgcaatcactgaactaatgattgatagtgtaaatgatacagaatacttgtttaaatggtcataaaatggatatgcaattacagcaacgtgaattaacttatacccctgatttagcattacgggtatttgcacctatcgcctctttgtcttggtctagtttactgcattcaggttttgccgaacatcaccataatcgttttgatattgttgtatccgatcctgctattaccttagaaacacgcaaacaaattaccactattaaagagaaaaccggtcgagtcaaacgctctaaaaaagatccctttacgcttatccaaacagcattagacgcttttaattttcatccagtcagtgatgaaacgcttccttttctaggtggcgcattaggtatatggagttacgatttaggtcgtcgcattgaaatattaccagaattagcaaaaaatgaacttaatttcgctgatatggctatcggtatttatgattgggcactaattgttgaccatcaactgaaaaaagccacattaataagctaccaagatattgacgcacgtctccaatggctagcaaagcacgctgataataacacaatagaaaaaaaagaaccttttgtcttaacttctccatggcaatcaaacatgagtagtgatgaatacaatgaaaaaattgctaaaattcatcaatacttactttcaggggattgctatcaagtcaatttagcgcaacgtttttgtgctaattatagcggtgatgaatggaatgcatttttaacactaaatcaagcgaataaagcaccattttctgcttttatgcatttacctcatcattttgttatgagtatttctcctgaacgttttattcatttaagtgatcataaaattgaaacacgtccaataaagggtacccttccccgtaaagcgcatcccgatgaagatgatgaacaagcgcaattgctggcaaattctcgtaaagatcgtgctgaaaacttaatgattgtcgatttaatgcgcaatgatattggtaaagttgccacaacaggatcagtcaaagtacctgaattattcgttgttgaacgctttcccgccgtacaccacttagtcagcaccattaccgctgaacttccagaaaatttaaacgcaactgacttattacgtgcggccttccccggtggctccattactggcgcacctaaaattagagcaatggagattatcgaagaactagagccacatcgtcgccatggatattgtggtgccattggctatattagtttttgtggtacgatggatactaatatctcaattagaaccctactgacggaaaaaaataaaatttactgttgggcggggggtggaattgtcgctgatagcgttgccgaacaagagtaccaagaaacctttgataaacttggtcaaatattaactgttttaagtgaagtttctcccgatgacacttattgatacctttatcaatcgctttcaacttactttacctgagccggtaaatcagcctattgatgctaaaaaatcggcagcagttttactgccgattatcaataagcctaatccaacgatcctcttaacagagcgcgcatcaacgttgcgctctcatgccggacaagttgcgctccccggagggaaacgcgatccacaagataaaagcctcattgaaacggcattacgtgaagcccatgaagaggtcgatattccgcccagtatggtttctgtgatcggccaattagccccattacgcagttcagaaggttatttagtaacccccattgtcggggtgatcccccccaatttatctttacggcataatcccacagaagtcgcttctgtctttgaaatgccattaagttatgtactcaatactcagcgctatttaccgttagattttcgtcgtgccggtaaaatgcatcgcatctatttttacccttatgaagggcatttggtgtggggactaaccgcagctattttacataacctcgcgttgcatattacttaatttattattttattaccctacgctatctttttatcgtcaccactacaactgtacttagctattttaaaaaaatgttgtaaactagactattaacgggacgatataatcgtaaaaacgctccccttactataaataactatatttttattatttttttaaccctcactcttattaaggagtctgacgtgattagcgttttcgacatgtttaaagtgggcattgggccatctagctctcacaccgtaggccccatgaaagcggggaaagaatttgtcgatgatttagtcagccaggatctgattgcgtctgtcactcgcgtagctgttgatgtatacggctcattgtcattgacaggcaaaggtcaccacactgatatcgcaattattatgggcttagcaggtaatgcacccgctactgtcgatattgacagcattcccggttttattcgtgaagttgaagaaactggccgtttaccattagcaaatggattaaaagttgtcgattttccagctgaaagtatgcattttagcaatgataatctttcattacatgaaaatggcatgacaattcatgcttttgcaggtgacaaagaaatttatcgtaaaacctactactctattggtggtggatttattgttgatgaagaaaacttcggcaaatctgtgcttgacagccaacctgtttcttatccgtatgcaagcgctgaagagttattaaaacattgtaaagaaaccggattatcaatctctagcttaatgatgaaaaatgagctagatcttcatactcaagccgaaattagtgcctattttgctgatgtttataaaaccatgcaagagtgtatcgagcatggtttaaataccgaaggcgtattaccgggaccacttcgtgttcctcgtcgtgctgcgtcactaaatcgtttattaacttccagtaatagcctgtcaaacgatccgatgaaagtcgttgatcttatcaatatgtttgcactggcagtgaatgaagaaaatgccgcaggtggacgagtggtcaccgcaccaactaatggcgcatgtggtattgttccagctgtattggcttattacgatcgctgtattgaaaaggtcacgcctgaaatttatacccgttatttcttagcctcaggagcgattggtattctttacaaaatgaatgcttctatttctggcgctgaagtaggttgccaaggcgaagtgggcgttgcttgctcaatggctgccgcaggacttgctgaattactcggtgctagccctgaacaagtctgtgttgctgctgaaatcggtatggagcataacttaggtttaacttgcgatcctgttgcaggacaagtacaagttccttgtattgaacgtaatgcaattgcctctgttaaagcggtaaatgctgctcgtatggcattacgtcgtaccagtgaaccacgagtttcacttgataaagtgattgaaactatgtacgaaacaggtaaagacatgaacgcaaaatatcgcgaaacctctcgtggtggattagcaataaaagttcaatgtgactaattagcctgattttatttctaaagtccatttataataaatggactttttttatttaaataatagttaaaccgattaaaaataataaccctataaataacacctatattatttatctataaattacttctctattttaaaatgtcagttaataactatatacctaccaaatataggtttatttaactttcatttaatttattctcatttttataacttataatttatgtgtgtattaattttttattttatctaaaaaataagataaaaataaataaatacattgtttattatatggttaatatttcatcatattgaattttatcatttttttaacatgataataatataaaaaatatattttcaaacgaaaaaacaataatgataattattatcaatatcatcttttaaatatatgaaataatatgttgcctttcataaataatatgatatcttctgcatcaagtcattggggagtagcctgtcttaaaataaatctcattattttaagaagtctgtatcaacatactcgcttatttttatttagcgtggtacagacgccattatttggttggcaagaccatagacacataattgtacttctttggttgggggtcaattgtgtgtatatggaaacaccccaaccgaggctattgttatgagtttttacgccacaattattctcgcccttgctctttctatggacgcatttgccgtcgctgtctgtaaaggcgccaccttacataaacctcattttcgtgaagccctccgcaccggttttatctttggtattattgaagcaagcaccccgattattggttgggcattaggtttatataccagtcaatatattattcagtgggatcactgggtcgcctttggtttattggttatattgggtggacgaatgatttatcagagtttaaagcgtggtgatgattgcatttgtgaagaggctcctcaacgtcacggttcactctctttaattgcgacaggtattgccaccagccttgatgcgatggcaattggtgtcggcttagcctttctacaagtcgatattgtccataccgcgatgaccatcggtatgatgaccatgattatggcaacactgggtatgctgatcggtcgctatattggccctgtgcttggcaaaaaagctgaaattatcgggggtatggtgttgattgctatcggctttaatattctttttgaacatcttgatctgtttatgtacgcacattaagtcgtcataatatgaaaaagcttaggtatgaacacaacctaagcttttttattctaaacacgttgataaacacgaattaaaaaatcagtttcacaagcaaattgctctgttttatctaatgtctcttttacctcttcactcgcacgccaagcaaaaggcgtcatttgtaataaatcaaccgcttgtttacctgttaacgccatattataagcaacttgatgctgtgctattagcttgaacccagcaaatatttcatcttttagtggatgaagatgcactgttgaataaatcaacgctttgagttgataaagatggcgtggtgcgggtgtcaccgtaataatatatccatcttgagcaataactcgcgttaattcgccggcattgcaaggggcataaatacgtaccactgcatttaatgacgcatcacaaaaaggcagacgttggctggacgcaacgcaaaactgaataggagcatagcgttttgctgcatatttaatggcaaccttcgccacatctaagccatagacttgtggattttttgactttagttgttgatatatctgataggtataatacccttctccacaaccaatatctaacacctgaggattatctttcggtaaatattcagccactaattgagccactttgtctcgcattggttgataaaagcccgcatctaaaaaatcacgccgagcactaatcatctctgcactatcccccggctctttagaacgtttaaattgtaccgggagtaaattaacatacccctctttagcgcaatcaaattgatggtgattgtcacaaacccaactatgggctttaagagcaagtggctgggagcaaagtggacattgataagacataatatttttacatattccaaaataaaattgggagagataataacatatctcccccaatcatgcggaaaaccttaatgcacagagaccatttcaatgcattgttgacatattgttattcggttagcttcgttttaatttttcggtatttgcaataaataacgcgataacgagcaataaaatggcaccggactgaatcaaagtatctaccgagtctttatgttcaacaataatcagacgcacaatagctgtaatacctatataaataaaataccttaaagggaaatgaccaccggataaaaaatattttacaatcaatgcgataaactcaaaatagaggaagtagatcaaaattccttctaataactgataagaagattcttcagcagctaagttaaataataaagaggcgataacataagtttctttgatcaaaaaactgactaatacgatggctagaataagtaatccgcaattcagcacccattgtaatattgttgcaatacattttaataattcttcgcttgattttctcatagctttataacctaaggttatcatttattgataacaaataatgatagtaaactacctgtcgttaacttggcacaagtttaatagaacaatcttttttccacacctattttttatcttttagggctaaaaaccccaaaataatggcgccataatcgcaatattcatctttaaatttcagcttagccactaaattacctatactactcgagtgaaaaggttaattttttacagaaggtaaattatggctaaaacaatactggtagcaattgacttattagaagatgatagaattcaccgtatggttaaagatattcaatttctagcaagaaaagctgatcactattttcattttgtcacagtcatgcctaatttacgctctcttgaagcttatggacttgattgtgatagcccttcagttatagagaaaaaacatcaagccgttattttgttaactgaaaaactagcacactgtgttcaacaacaattccaattacctaaagagcagtaccaatgccatgcccttatagggacaccaaattataatattctcgaactcgccaataagatggatgtagacactattgtcattggctctagctctcgtaatagacataatatattgcttggctctactgcagattatattgttaacaacaccaattgttctgttttagtgatccgttgataattgacgatacattgttaataaaaaatgctaggattaaaatcaaaaacctttttttaatcccacactaaaatcaaccatcccatttttgattaacatattgatgtatcatttaaaaaataatctttgccctgtattaaaatctttggcattaagatagctacggccaagcgcaccggtacaatggcaaccataaacctcaacatggtgacctattgcttttttcgctctttttaacgccgccagtgaggcacagcgaagatgtagccctccgacaatagcttggatcttgtcatttcccgttatttttttcgcatggcgaataatcgcatcaataccagaatggctacatcctgtaataatcaccagtccttgctgaccttgccaaattagaaaactatcatcaagtacataatcatccgtttcgctactttcactgacaataacgccataacgtttatgtatttgacgctctgtcacttggccagaatagataaatcttttatcgatagctttaggtgtcactgttaactgaaatgaaaactgctgttctagctgctgtcggttaaaaaatggagtaaggcgcttaaatttaatagactggcgccccataaaaagtgctgaataacgtactgaaaataaatcaggatgggcaataatatgtggcttagtaataaagaaatcctcatttaaatgagttaatccaccaaaatgatcatagtgcccatgggaaataacaattgtcgttaatgacgtcaaatcaatcgccatttttttagcattattgataaaagtgagatctttaccagtatcaaataaaattttactttcgctttcagtgtcttctaatagcagtgaaaggccaggataatggctaagagcgggatcgcttgtcttattttctagtagtgccgtaatagtaagcataatttttaattattatcttataggggataatgcatgataattaaaaacagctagagtgccaaattaaaaaagcagttgataagacgccgtcaaccgcttaatggtattgctaataaaataaagagtcggctatcttgctaccatcactgaacgtttcgcataacgggtaatatctgccgctgttgagcctaaatgatagctgtctacttcaggattatgtgagctaacaacaattaaatcagcattaacctgatcggctatctgcaatatgccatcccgtggtttaccaatacagatatgtgtttcaatacgatcttccggtaaatcaaatcgagcaataattttttttaactctttttctgctgatttttttaagcatacttggtcaagttgatcgccattcatcactaagcgataataagaagattgtggcaactttggtaaaacatacaaaaaatggacatagggatcttctcttttggcaatgttctccactaatgtaatggctttatttagtaagttatcttcatcgatatcaatgggaaccaaaatagtcttatacatatcgcctcctattattttttaattgtaggatagtctattttgaaaaaaataccggatatagttaacatatttaagaaatagattaataataatagatatgtataattcacatgcacttaaagtttttgaattaaattatacttagagaaaataaaatttattttaaaataatacattactttaaattttaaattaaaaaataaaataacaaatttatattcaaaatattctgactaatggtttaactcaaattaaagtataaccctatcgaaaaagatagggttatatttatccaatgaccatcaattcaactaaaaaagattaattttttaattgtgctttttgtttacgctttttcacaaaatgataccctattcctaaagcaataaaccaaatgggcgttaccatcagtgcttgacgggtatcatgttcaaatgccaataacacgaccataaacacaaaaaatgctaagcatagccatgacatcactatccctaatggcattttataaatagattgttgatgtaattgaggacgtttcttacgatatgctaaatagcagcataagatcatactccaaataaacataaataataacgcagagaccgttgttactaacgtaaatacccgcatcacatctggaataaaataaattagtacaataccgcaagataaacagagactcgtaaagagtaaaccattggcaggtactgaacgttttgatagctggctaaactgttttggtgcctccccctctttcgataaaccaaatagcatacgactggttgagaagataccactatttgctgaagaggcggctgccgttaataccacaaagttaactaaactggctgcggctggaataccaatcatgacaaagagttctacaaacgggcttttgtctgccaaaatcgaacgccacggcgttactgacataataatcgccaaagccaaaacataaaaagtaataatacgaataggaatagcgttaatcgccttaggtaatgatttctcaggatcacgtgtttcagccgctgctgtacctaccagttcaatccccacaaaggcaaagatagcaatttgaaaaccagcaaaaaatccgctgatccctttagggaacataccgccatcattccagatattttcaatagttgccgtgtggccggctggagattgaaaatttatgctaatcaatacgataccaacaataattaaagagacaatagcggtaattttgatcatcgaaaaccaaaattccatttccccaaataattttactgtggctaaattcaaaataagtagtgtcagcacacaaataaaagacgttccccattcaggaaaattgggcgcccaataactaatataggaggtaatggcaacaatatcggcgataccggtgataacccagcaaaaccaataactccatccaacaaaaaagcctgcccaaggccctaataaatccccggcaaaatcgctaaatgatttatattctaaatttgataataatagctctcccattgctcgcataacaaagaacaggacaaagccgattatcatgtaaacaaaaataatcgatggtccagctagcgaaatggttttcccagaacccataaataaaccagtaccgatagcaccaccaatagcgattaattggatatgacgattggttagcccgcgttgtagagtggcatttttcactctaacgggctgagtaacttctgtttgctcttccatacaatacctgaaatgttttcatatttttgatgttgttacgccacttttttattttttcgccgtggctaagtttgcgaaattattgtgacacaaatctcagaataagtaatgaaaagatcacttttagtaaaatgagtgacgatttgataaccaaataatatcctttcttcattttaatagacgatattttatacatttggaaaaaatttcaaattaagggttgacccgcccttaagagaggagaataattagcgcatcgggttgttagctcagttggtagagcagttgactcttaatcaattggtcgggggttcgagccccccacaacccaccaaatttacgctgagtaatcagtcagataggccacttagtgataagtggcttttttgtttctatcgctaagtgtcgcaaaagtgtctaaacatataatgattatcacgctcattaattgcgttatatagctgactaatatttaacctataaattgtgattaaaaaataagtgtattacaaaatattaaaccaataaaaatattagtatcagtattattgactaataacagcatcaatgaagtttgatgggttaaatatcgctttgattaagcaatcttaatgctattaatatcatgctaaacaaaaccctttaatggttaatatttactgttattttgccaaaaaaataccacctatattcttatatagatggtatttcattaaataaaatcttactgcttattaataattaagtgttacgatattccgcttctgcttcatcaaaacgttgttgattttctgccgttggtgacttacccattaaactgacaataacaatggctatggacgcgaaaataaagcccggaataatttcataaagaccgaaccatttatattgcatccataccagtaccgttaatgcaccaattaacattcccgcaaaagcaccattacgagtcatacgtttccaagtgacagagataaggatcaccggaccaaatgcagcaccaaatcctgcccaagcattactcaccaaatcaagtactttattttctggatcacgggctaaataaatagcgataaccgcaactaataacaccatgccacgaccaacccaaactagctctttttgactggcatttttacgaataaaaggcttatataaatcttcagttaatgcactggcgcagactaataattggcagcttaacgtactcattaccgcagctaaaatcgcagataacaaaataccagctatccacgggttaaaaagtaacgaagctaattccataaagatacgctcatttttagccataaccggacctgcaacggtcggattaacttcaaaataagcaataccaaagaagcccaccgccaccgttccgcctaaacagaggatcatccaagtcataccaatacggcgcgctttacgaatagtttgatttgaatctgcagccataaaacgcgcgagaatatgaggctgtccaaaataacctaatccccaagctaataatgaaacaatagcaataaaatcaagccctttaaacatatcaagataagccggatctttcgctttaatgatctctatagaggtgtcaattccaccaattgagaaaataacaataattggtgtcagaataagtgcgaaaatcattaatgtggcttgtaccgtatccgtccaacttaccgccaaaaaaccacctaggaaagtatatgcaatggttgctagtgcaccataaatcatcgcttcatgataaggaatgccaaaggtagactcaaaaagcatacctcctgcgacgacacctgatgcacaataaatagtgaagaaaataagaataactaacgcagaaataatgcgtagcattttgcttttgtcatcaaagcgagaagttaaatagtctggtagagtcagtgcattattgtttttttctgtttgtaaacgtaatcgccctgcaactaaacgccagttaagccatgcacctaaacataaaccaatggctatccaactttcggagatccccgcaaaaaaaaccacacctggtaatcccattaatagccagccactcatatcagaagcgcccgcagaaagtgccgttactacactaccaagccttcggccccctaaaatataatcatcaaaattttttgttgatcgatacgctagatagccgataaaaagcatccccaatatatagatcgtaaaggtaattagcattggcgaatttagagccataatcgcagttctccatatatctgttacgatcaattgctatgctttcaacttatgcaggaacgttgcacttcgttgcacaccaatgaccttatcagtttttatttaaaataatttcttactgtaacaaataaaacattcatatcaatcctagaataggttataagcatttaacaagaaattaacgtatcggtgtttaatttttgtatgtaacttcacactatttgcttcggttgaaagagattaatattatcttcccattgaagaaaaatatataagccaatgaattataagtattatttatctatctaagatagtattttttaaccatttataaaacctgacaactttcacattatttataaatttattgttaacaatgttgcacaaagttgcaacatgactgatattaagaaaaataactggtcaatgtgccgtataagtaagatgcacgatatgaggagcactgcatgagtagcacaacaatgggtgttagacttgatgaagaaacccgtaatagattaaaagatgctgcacaaaaattagatagaacatctcattggctaattaaacaagccatcttcaattatcttgaacaaattgaaaatgatcagctcaccctaacccctattacacaggctgagcaagatattgaagaaagcactgatcccctaacggcacattatcaaccgtttttagaatttgcagagcagatccacccacaatcggtgttacgctcggcaattacttctgcttatcgtatacctgaaacacaagcagtgcctatgctactacagcaggcaacgctacctgagcatgaggctcaagccacgcataaactggcttactccattgcagaaaaattacgcaaacaaaaacagggtgttggacgctcaggtctggtacaaggcttactgcaagagttttctctctcttcccaagagggggttgccttaatgtgtttagccgaagctttattgcgtattcctgataaagcaacccgtgatgccctgatccgagataaaattagccatggcaattggcgctcgcatttagggcaaagccaatctatgtttgtcaatgccgccacttggggtctactgtttacaggcaaactcgtctctacccataacgaagagaaattatctaattctctaaatcgcattttaactaaaagtggtgaacctttagtgcgtaaaggcgttgatatggcgatgcggttaatgggggaacaatttgtcaccggtgaaactatctcccaagcgttagccaatgcacgcaaacttgaagaaaaaggctttagatattcctatgatatgctaggagaagcggccctaacggaaaaagatgcgcaagactatttagtctcttatcaacaagccatccatgccattggtaaagcctctaatggacgaggtatttatgaaggaccggggatctccattaaactttcagcattacatccccgttatagtcgagctcaatatgatagagtgatgtcggagctttaccctcgcctactctctttaacgctacaagccaagcaatatgatattggtattaatattgatgcagaagaagcggatagactggaaatatccctcgatttattagaaaaactctgcttcgagcctgaattagcgggttggaatggtataggatttgttattcaagcctatcagaaacgctgccctttagtgattgattatattattgatttagctcgccgcagtcgtcgccgtttaatgatccgtttagtaaaaggggcttattgggatagtgagattaaacgcgcgcaaatggatggactggaagattatcctgtttatacccgtaaagtatataccgatgtctcttaccttgcgtgtgcgaaaaaactgcttgcttcaccgaattatatttatccgcaatttgccacgcataatgcccatactttatcagccatttatcatctagcgggtcaaaattactatcctggtcaatatgaattccaatgcttacacggtatgggtgaacccctctatgcacaagttgtgggtaaaattgctgatggtaaacttggtcgcccttgtcgtatctatgcgccagtaggtactcatgaaaccctactggcttaccttgtgcgtcgattattagaaaatggtgcaaatacctcgtttgtaaatcgtatcgctgacaccaccatctccttagatgaattagttgccgatccggttaaagagatcaataaaattgcgcaagctgaaggacaaatcggactttcacatcctaaaatcccgctcccaatgcagctttatggtgatgaacgcaaaaattcaccggggattgatatgtctaatgagcatcgtttagcctcattatccagtgcattactgacctctgcgatggaaaaaattcacagtcatcctctccttggtggtgagtgtaatagtgcagaagaagtgattgcaccacaatctatactcaatccggcaaatcacaccgatgtcgtcggtacagtacgtgaaacaacggccgccgaagctaattttgctttagatattgcccaagaaaatggtgaaatttggtttgcaaccccacctgcggaaagagcggcgtttttagtccgcacagcagaactgatggaacagcaaatgggtccattaatgggtgtcttagtcagagaagcgggcaaaacctatagtaatgctattgcagaagtgcgtgaggcgattgattttctttattattactcagcacaagtggcaaatgattttgataataatacccatcgtcctttaggccctgttgtctgtattagtccttggaacttcccattagccatctttagtggacaaattgcagcagcgttagcggcaggtaataccgtactggccaaacctgcggagcaaacccctctgattgcttttaaagccgtagaactattttatcaagcaggagtacctcgcagtgcattacaactcttaccgggtcaaggggagaccattggtgcacaattagtggcagatgaacgcgtgcgtggtgtgatgtttacaggctctaccgaagttgcccacattctgcaaaaaaccttagcgggtagactcgatagcgaaggtcgccctgttcctttaattgctgaaacaggtggcttaaacgccatgattgtcgactcttctgccttaacggaacaagtggtcactgacgttatggcctctgcttatgatagtgcgggtcaacgttgttctgctttgcgtattctctgtattcaagaagaggtggctgatagcacgattgaaatgttaaaaggcgcaatggcacaagccataataggtgatccaagtctcttatcaacagatattggccctgtaattgataaagaggcaaaagcgggtattgaaaaacatattcaaactatgcgcacagcgggttttgacgtttatcaagcaacctataatcaacttactaaacaggctgaaaataacagtacttttgttcctcctaccttaattgagttagataaaattagctcacttaaaaaagagatttttggccctgtactgcacgtcgtacgttactcaagccaagatctgcctgctttattagctgaaattaatgcgactggatatggattaacaatgggggttcatacccgtattgatgaaactatcgcttatgtagcgactcatgcaaaagtaggaaatttatatgtaaaccgcaatatggtaggtgctgttgtcggggtacaaccttttggtggtgaaggtttatcgggcacggggccaaaagctggaggccctgcttatctgtatcgtttattatcaaaacgtcctgaaaatgccataacacaaaccttagcacgtcaagatgaaacattaccccttgatgcctctatgcgacaaaagttattacaaacctatcatcactatatgacgtggttagcaaataaaacggaacctgcacattatcaggcgctagaagaatacgccaatgcatcacaagccggaacattgcgcgtattgccggggcctactggcgagcgtaatacctatcaattagtcccttgtggcaaggtgctttgtctctcagataatgagcaagatatatttactcagttagcgggagtctttgcatcaggatgccatgctattgtccataatgctgttttctcgcaaaaaacctatcgtgaattgcctgatatgatcagaaaagcaatcactctcacggacaactggcaagatgagtcactaagcattaatgccgttatttatcatggtgatagtgatcagttaaaagagacttgtcagcaaattgcacaacgtaaaggggctattatttcagtacaaggcttctcacgtggtgagacagcattgttattagagcgtttattgcatgaacgagcattaagcgtcaataccgccgctgccggaggcaatgccagcttaatgacaatcagttaaacccagcgttctctttctcactttatttttgagaccacctttaacttacttatctattaaaggtggtttttttatttctggaataaaaaataaaaaggagcaacataatgttacccctttttttaggtctctcttgaatgcgattagtgaccactactcatcgaggttggcgcttggcaccaatcaagatattgctcatacttacgtagggcaatgttgtagttactaaatgcggagggagtgagctttttactcaagtctgactgaattttctctgtcgtgaattcttgacgaggaaaattagtggaagtcagcaattcatcgagtcgacgtaaacgaaccacatactcacgaacagtactgtggctcatctccgtttgttcgaacaaatactgcttaaaagacataatgtcaaagtaatcagtttcactattacagtaaatctcactacaaaaacggcacagcgcagaaaactttccttgcaaggtttcccatgtttcatcatcaattaaatctgtcatttcagaaatggcttctttattgataacttggcgattgaatacgagagaaatccgatcaagcgccttatggcaatgcaaacaatgagtttggctgtgtttatagtctttaatgtaacggcttagcggccgtttcttttgtgttgaaacagacataagagataaagccctgtgttgtagtcttaataaataaaaacaaaaataagcaaaacttctatttctctgggtttaagcgtgctcgcagccttttgattgcttggctgtgtagctgacttacgcgggattccccgacattaagcactgcgcctatttctttcaaattaagttcttcctgataatacagggtaagaaccattttttccctttcgggaagcaattctatcgcgtctatgactctttggcgaatatcactttccaataacatttgtaaaggattgtcatcgtgatcttcgtcttgagacggttcacagctttcaccgtaaatttcatgccattcgtcataagagaacaactggctgttatttgtatccaataggatctgccggtattctgctaactcaatctgcaaatgatcagcaacttcctgttctgatggtggtcgtcctagatcctgctctaactgatgaatggattgtgtcacttctcttgcattacggcgcacactacggggcgcccaatcacgacttcgtagctcatctaacatagagcctcgaatacgttgcacagcataagtagtaaaggcggcaccttgcattgagtcataacgctcaacagcattcagtaggccaatcccccctgcttgcaaaagatcatccaattcaacactcgcaggtaacttgacctgtaatcgtaatgcttcatggcgaaccaaagggacatatcgctcccagaggctatttttgtccatcacgccttcggcggtatacaaatcactcacaacaaaagacacctttggataaaagaccggaaaccattatccgacgaaatagtgttagcaatcggctgaacagtgaagcaaaagcccctctttttcacctatgctaaattttcagcgaaaattgggttttcattgataatttaatttgttattgcattacaagtacatactgtaccttaagatgggtcatactaatccgcagaaaaaccgttaaataaattgatattttgtcttattgaaagaaatgtattcatcaaatctgtattttgttgataaaaaaataacatataaatcatattacttatcttttatctatttttacctacaacccatcaatgggaatacctatccatgattaataaaaaaaacaattgttttgatgaaaaaacacccacagcaaaaatggctgtgggtgggatctgaagatgagtttaatgaaggattaacgtaacagagacagaacagtttgtggtacttggtttgcttgagccagtacagcagtacctgcttgttgcaagatttgatttttactcatattggacacttctgtcgcatagtcagcatctaagatacggctacgtgaagcagataagttattaacagtgttatttaagttattgatagtagattggaaacggttttgaatcgcacctaatttagagcggctttcatcaaccttactaattgcgttatctaaagttgctaaagcgtcatccttaacatttaaaactttaacatctttacctgcatctgccttaaatttaatggttttactaccagtgaactcaatttcaccagtagtagtacctgattttaatgtaaagtctgatttacttactacgtactcgtcgctaccatcctttaagacaactttattagcagaaaccttaccatctactttatactcttttactgaaacaccagtcgcgtattttgtaccgcccgaaatgcccagagcgtttgcatcgatagcatcacctgttgctttaaccccttttttctctgttttagcatcaaacaggttatcactagcaacacctaatgtgtcgttatcaattttatctaaattgaattcaatcacttcattgtcattagtaccgacttgaatggtcatttttgacttttcaccactcagtactttcacaccgttaaactgagtttgttctgaaacacgattgatttcatctaaacgttgattaacttcattttggatagaagtgatatctgagttagagttagtcccgtttttcgcttgaacagttaattcacgaatacgttgtaagttattgttgatttcgttcaatgcaccttcagtggtttgagacactgaaataccatcattcgcattacgagatgcttgagttaaaccgttaatatttgaagtgaaacggttagcaatagcttgacctgccgcatcgtctttcgcgctgttaatacgcatacctgaagataaacgttcaattgcattaccaagtgcgctttgtgaacgatttagattattttgagtgactaaagacagataattagtattaataacttgtgccatacaatattccttcaattttatttgaaaatttttaattaataggtttgttattacactcctgtaataacgttgcctaaacactatcgtcattaaatcgaaggtatttatgtgttttcgcgtcgcgaaaatagtaaaaaaagccaattaattaatttataagagataatgactagcagaaaaaacaaaaatagatggagagaaaaaaataaactaaaacagagtgagtttaaatataaaataaaatgacaaaaaagaccctcagatgagggcctttgatatagaaaggtatcttttgtgtcagggtacgaattaacgtaacagagacagaacagtttgtggtacttggtttgcttgagcaagtactgaagtacccgcttgttgcaagatttgaccacggctcatgttagaaacttctgttgcatagtcagcatctaagatacggctacgtgaagcagataagttgttaacagtgttgttcaggttgttgatagtagattcaaaacggttttgaatcgcacctaatttagaacggctttcatcaatggtgttgatagctttgtctaaagttgctaaagcgtcatctttaacgtttaaagttttaacgtctttacctgcatctgctgtaaattcagttgttttagcaccagtaaatttagctttgtcagcaccttccagtgcgaaatcgcttttatttacgaggtaatctttagtaccatcattgaaaattactttatcagcagaaacaacaccatctactttatattcttttactgtacctgaatcgtatgaagttgcaccagcaacgccgatatctttcgcatcgattgcagcacctgcttctgtaacaccttttttctctgttttagcatcaaacagtttatcgctagcaacacctaatgtatcgttatcaactttatctaagttaaatttgatagtttcattatcgttagtaccaacttggataaccatttctgatttctcaccgctcagtactttcacgccgttaaactgagtttgttcagaaatacggttgatttcgtctaaacgttctttcacttcgttttggatagaagtgatatctgaattagagttagtaccgtttttcgcttgaacagttaactcacggatacgttgtaagttattgttgatttcgtttaatgcaccttcagttgtttgagcgatagagataccatcgttcgcattacgtgaagcttgagttaaaccatttacgtttgaagtgaaacggttagcaattgcttgacccgctgcatcgtcttttgcactgttgatacgtagaccagaagacagacgctcgattgcacttcctaaagttccctgagatttgttcaggttgttttgagttaccagggatagatagttggtattaatgacttgtgccatagctagattcctttaaaatcaagtcgataaaataaaagtttgcctattcatttacggtgtcaatcaccggcaacaagtttatcggcaccccagatacaacctttaacttttccaacaaatttttctgtgattttttatagaatcgccattaactaaatgatatataaagaaattaatttattatttttttatattatttttatcaattctcgtcataaaccttttttcttatgcaaaattcgactttagtattcaatgacaataaaaggcttctatatggcggtctgtttccctcatcaaaaatagtaaatagacgtaaacttttcgccaattcttccgataacgctgtgtagggattattttacgaacacagaaaggagaccagtatggctggtattagtgcactaggaataggcgccaagatgccacttggcgagacattaatgcaattagaggctgcggaaaataagcgccttgaacctttagacaaacagatgaaaagctacgatgcacaaattactgcatatggaaaaattcgtagccaattagataaattacagaaagcatctgaagaattaaaaaaattcgataaaatcgtcgccaccaaagttgatgatgagtttgatgcttttaaagtaaccactgatggtaaagcaagcattggtaattatacggtctcggtaacagagcttgcccatgctcaaacactgaaatcaaaagccgtcagtgatatcaaagatcctattggtgaaacattaggtgaaggcaaaacacggactttagtgatcacccaaaaaggtgaaaaagagcctttaaaaatagagttaacagatagtcaaacttctattattgaattacgtgatgctatcaataaaaaagaaggcaacgtttctgccactattgtaaaagcccaagatggcgttaaccatttagttctgacttctcgtaaagaaggtacagattctcaaatggaaatcactgttgaaggtgatagtaagcttaacgattttattagctactccactaaaacaaacagtggtgcaatgacagagatcgttaaggcaaataatgcaaagttaacgattaatgggattgaaattgaacgtcaaactaatgaaattaaagatgcgcctgaagggatcacgttaaatcttaagaaaaaaaccaatgataataaagatggcgtagataagcctgaaattattacggttgcgcgtgatattgagccaatgaaaaaggccataaaagcctggaccgatgcttataatgaattaaataaaacctataaagatttcaccaagtacacccaagttgaaaaaggtgaagatgcctctaaagacaatggtgtgttattaggtgataccactagccggatgattatgtctgagctaaaaagctttatcactcgttctcaatcttcatctgagattgatacccttaataaaatgggcattaaatttaaagtagatggcacattagaagttgatgataaaaaactcgataaagcattaaaagaaaaacctgctaacgtcaaagagttttttatgggtgatggtaaagaaacaggatttggtactcaaacctataattacctgaaaaaaacgctgcaatccaacgacggcacccttgatattgccactgatggtgttaaaaaacgtaaaaaatcgttagataaccaaattaaaaataccaaacgtactattgaagcgacgatggaacgttataaaaaacagtttcaattattagataaaatggttaatgccatgactaactcaagtgcatcaattgaacgtttattacgctaatttttaagtaggatattaggatattatgtatcaacaatcagccagtaaaatgtatgctcaaatcgatgttgaaagtgagattttaaatgcttcaccttaccagctgatccaaatcctatttaatggggcgctaagcgcccttcgccgtgcattaatattaatggaacaaggaaatatcgccggtaaaggagaaaatatttctaaagctattaacattattggcaacggcttaaaacaggggctggataaagaaaaaggggaggagcttgctgaaaatttagcattactttacgactatatgatcactcaactactcgatgccaatttaaaaaataatccagaaaaaattcatgaagtcatcaagttattaactgaaatttctgatgcttggcaacaaattggcacacagattaattcttattaaaaagcgtggacagcaaatatggatataatggcagcttacgagcaggttttgaaattaagtgagcaaatgttaacgcttgccaaaaatcagcagtgggatcagctgatagaaatggaaatggattatttaaagagtgtagaaattatcactaagatgataaaacccactgagggtgagctgataatacaacagcagctcaccaatatgttaaagaaaatactcgaaaatgaaaatgagacgcgaaatttattacgagcaagattagataagctcgctgttttaataagacagactgaacaagagcagagggtacaaaatagctatggtcagttttcagagcatagttattatcctgatctcaatctaaaataactttcctctgcgccaaaagcggttttattagctaatggcgtctttatttaccgagttatttcttgttatacgatattatttgttatcggtaacgttgtgacaattaaacgatatgatataaaaataacataataaaaactgaatttattacactatatcattcgactatcgctatcatcatctgctcttccccatctatttgttcttcatttactgatatcatcaccgataaataaaaatcgcctacacatggcaggcgataaacttactgtttcaaatagataataattgctttatttaatcacatcgtagagttgaggatctgcaaaatagtctgcggttaatgccatagaaggctcatattgtgccccatatatatcagagaatgctttcccctctttacctaatgaaactttacgttcatcatcaccgctactttcatatatggaataagttttacggcgcatagcaatatatttatctgcatcatttttaatatcagtatgatgctcaaatatctccttatcagttaattctagcttgttcgctaattgacatccccaacgtgttaaacatctttctgcaaaatgtcgcacaattaaccccggtgaaaatagtgcatttttaccttcactaccatcaatagcagcattgcctactaaagtcgcatggcgtcctgaaagcgggaaaatatgcattttcgtctcagcagtcacggttggaataacgcaagcaaatccttttgagcgttcatcaatggcataaaatccgacatattccttaacattgctacctagtgtcaccttttctggttggaaattaagtggccctgggacgggatcaatagcaaaaatattgaccggaatatcttttaataggggatcttttaacatggcattggcaagcatatgacaggtgatgccaccacggctccaacccattaaattcacttgggtgggaatgatgccatctttgcgaaaggtacgaataatttgttgctgaagttgttgttgagtgacatagcggtcaccataattatatttacgccataaaaaagagccagtcacttcaacatcttcaatgggaatacccgcttttttcagttgattatattgttgttctgttaacttttcacgttgccagtcaaagttgcctttcattaagcacagtgcatgttcaacattttcttcccatccactgccaaataaagagccttttatatctgaataattagggctttcaacccataaatcatcttcttgcaaattaccgctacctgggccatctacaataaaccactgagcaaattcgcgatctagattattatgcgccaaggtggaaacaagctcaccttgccaataaacaggattattatgattattattatcaaaagatgaagcgccggtaccacataaataaacggttaatactgtcataattaaaaattccttgtatgttttactaaaaaatcaaaatatgatctctgtttccttgtatcgagctattccttagctcaagtaaactttaacgacgacactttttttattcaaatataaaaaagtcattatcacagttcagatcacataattaataactatttaagttaagtcgtatattaattgctgtatagccatcttaattaaactaatgctattcattatctgcttttttagcgaaaaaattattttgattataaaaataatatcgaatatttcacgaagttaagagactaaatcttaatagatttatgatttattgtgatagtgaattgggatagtgaagagagtggttaaaaataaatcattaacgaagtgtttatttttcttcttaccgttgaagttgagataaaaacaaaaaaatctcgctaatgatcttaacgagatttttatcaattgatacgcttataaacgattaaatgccacaactctcaccgcaggaatatcagcttgagccccttgtgcaacttcctgacatgctttttctaacgcaatatggggtgtgatcccactctcagtttctactattttatgcccggcgtaggtatcaccatttctggaacgcactttatacgcaataaaccaatattccatatcatcaccgtttacgttattaatcataaaattaccataacggtttatgactgacgttaatgtgataataatcaataattttcagttttttcgtatcaggttgataaaaatgataacagcgtacagatttagcgattagcgtccatttcagtttgtatcatcttcttaatttttgtggctttttcaaaatgatctaatttatgcgtcattatccaccaagttgccgcttccattaataattcaggatcatcatttttattagcaaaaaaagcataaaaagagaggcctaccccttctcccttttgcgctatttttgtatcacatacttggatgattttttgctgcaacattctgcgcatcgtttgtgtcactcagtgcgttgttagttagtacagcttacatgggaaatgttgtcttgtgaatacgaaaatgacggaaaggattttattaaaaatgagtgttttaaagttgattaatttaattatatttatataaaaatataaaacaatctaaataagagtatctaattacaaatcttatttaattaatataaaatccacatttaccaatcgggattaaaacactatttttaattatttcttttagagaatatcgggtagtaaaataaactcactttaagaaagtctaaattagatatattaaagaatatatttatttaacattaaataaatgaataaaaggtgtattatataatattgttttgttatttatcctctaaaaaagaataaaggaataatgatatgaaaaaagtattactcagtcttgctatgctgagtgtaatatcaacgccggtattggctaaaacgcctgttgctaacttaaaaatcaatggtgatattaagccaccaacttgtactgttcatggggcgacacaaagtgatgttatttttgattacggagtcataagcccaacacttatccctcaatcgaaaaactacgagtatcctttagctacaggtaaaaataccgttacggttgaatgtgatgctaaaacatatttaacctttgttgcatctgatacttatgacagtgcggaattagctaatgatacgacaggacaatttcatttagttgataaagcaaatcctgaagccgctgttggtgcagctttttttatatggacaaatattactgtcgatggtaagcctgcgtatatttcacgagcaaatgatgttgctattacggggaataaatttaataacgtcctatacaaaggccctaccaatggttggacctcagaacaacaatcagatattaataaaaactctctgtctctcatttcaggtgaaattttccaagcgaatttcagtcaaggaaagacaagtcgtacttttattttatccaaagatgcactaagtaaaaaaggaatagatattgctgatggattagattttgtcggagaggttgttctcacttttaactttggggtctaattttaacatattgataatcacattataattaacctttatattgtgattatcttttacgttaaaaaataaagaggcctaatttatataattaatcaattatcaatttctgctgcgctattgatgcccttattttcttcctcttctttttgtctgggttcctctttcaccttctgtgcttgtagtagcataagtaaattggtcccccattcagaggtaatattatcacttcatcaacagatgggggacccatcagcaaaaatggtacaggataatatgatgcttagatgcatgaatacgagcaaaaccaaatattgctattaagccaaacattgaatgctcctatcccctatatgtccccatcaagccacaacaaagataatattcttttatctcaatgagttaattttatcacacctgcattgacataatctcttgataagcggcgaccagcttattacgcacttgtacgcccatttgtaatgagatgctggatttttgcatatccaccatcacatcatttaattcaacaccgggcgtacctaacgtaaatgcttgtactttgttggttgcattaacacgagtttcgttaattttacctactgcttgaaccaactgagttgcaaatcctgcctgtactggctggggtttggcaatattggatgcttgtaaagtttgaatttgcattttatccagaacactttcaatagctggaattgacatataaacctctgcgttaatcatctaattcaatttttgaatcaatgtcatagtaagtaggtgaaccaacacgcttaccgagtaataccctaacacaggggcttcattccaaagcgagtaattaacgcaaaagttaaaggctaattacgccattaaatgaaacgcaaaaggccaataatgagacacctgagagtaggtttatttatttgcgtaaggggagtctgttttgttacgccacgcttttagtattcatcccgaactacaaggcaaggattgtctatgaatgccgaaaaaaccgacgttgtgaaccagaaaaaaggttttaacgccattattaaccggataaaagccgatccgaaaattccgcttattattgcgggatcggcggcgattgccatttttgttgctgcttttttatggctacaaagccctgattataaagtgctttatagtaatcttagcgataaagatggtggcgaaattgtcacacagttaacacaaatgaatgtaccctatcgcctatcacaaaatggttctgcgattatggtacctgacaatcaggttcatgaattacgcctgaaactcgcacaagcggggcttccaaaaggtggagctgccggttttgaactacttgataaagaaaagtttgggatcagccagttcagtgaacagattaactatcaacgtgcacttgaaggggagcttgctcgtaccatcgaaaccttaggtccagtgcaaaatgctcgtgttcatttagcattacctaaaccctctctttttgttcgtgagcaaaaatcaccttctgcttctgtaacagtaggtctgctgcaaggtagagccttggacgaaggtcaaattaatgccatcgtacatattgtagcaagtagtgttgcaggtatgcccgatagtaatgtgaccattgttgatcaaagcggtaagttattaacacagcccgatgctttaggtcgtgatcttaattctattcaactcaaatatgtccaagagttggaaagtcgctaccagcaacgtattgaaacactattaggccctattgttgggcgtggtaatgttcatgcgcaggtcaccgctcaagttgatttttctcatacagaagaaaccgctgaagagtacaagcctaatcagccccctaaccaagctgcagtacgctcaaaacaagtgagccaaagtgagcaaaatggaggcatgttagctggcggtgtgcccggtgcgttatctaatcaacctgttgcaccaccgcaagcgccgattgaaaaagccaaagacacgacggctgatgagaaaacaacatctaccaatgctaatcgttcaatgacacgtaatccaaacagcaatagccgtttagatgaaacaaccaactatgaagtagatcgtcgtattcgtcatgttaaacgacctgttggcaatattgagcgcctttctgttgcggtaatcgtcaattacaaaaccgtagaagacaagaaaaaagcaacagaaggtgaagagcctattgtcgaaaataaacaagttccgttaaccgatgaacagcttcaacaaattgaaagtttagtacgtgaagcgatgggttattcccaagagcgtggtgactctttaagtgtggttaattctcaatttaacgataccgaagagccagtgattagcgttcctgtgtgggaaaatccacaaatattggctaaagcattagatttaggccgctggttattgcttgttatcatcgcgtggatcttatggcgtaaattagtgaaacctcaacttgaaaaacgccgtgaagcagaagtcgccgcacaaaaagcgattttgaaaaccaagcttgaagtgacagatgatgtcaacgaagccgaattagatgaagaatcaagacgtaaacaagcacgtcaacgtgttagtgccgaattacaaagccaacgtattcgagagatggcagaaaaagatcctcgtgttgtagccatggtaattcgtcaatggatgagtaaagaacaatgagtaatgacttaactggaaccgaaaaaagcgccgttatgttactgacattgggtgaagatcgcgcagcagaagtatttaaacatctaacgacacgtgaagtgcaacaactgagtattgcgatgtcttctatgcgtcagatctccaatcaacaactcattgatgtgatggcaagcttcgaagaagatgctgttcagtatgcagcattaaatgtgaatgctaatgattatttacgctctgtacttgttaaagccttaggtgaagagcgtgctaataatctgctcgatgagatctcagaaacccgtgaaaccacaacaggtattgagacacttaactttatggagccacaaatggctgccgatattatccgtgatgaacatccacagattatcgccaccattttagttcacttaaaacgtggtcaagccgctgatattcttgctctgtttgatgagaaattacgtaatgacgttatgttacgtatcgcaacatttggtggtgttcagccatcagccttagctgaattaacggaagtactgaacaatttacttgatggtcaaaatctcaaacgtagcaaaatgggtggtgttcgtactgcagctgaaattatcaacttgatgaaaagtcagcaagaagaaaatgttatcaccgcagtacgcgactacgacggcgaattggcacagaaaattatcgacgaaatgttcctgttcgaaaaccttatcgatatcgacaaccgttcaattcagcgcattctacaggaagtggaatccgaatccttggttgtggcattaaaaggttgcgatcaagaactacgcgatcatttcctcaacaatatgtcgcagcgtgctgctgaaattatgcgtgatgacttggcgtctcgtggacctgttcgcatgtctcaagtggaagctgagcaaaaagcaattctgcttattgtacgtcgcttagctgagagcggtgaagttgttcttcatggaggagacgatacctatgtctgataaaaatactgatacaaactggaagccttgggttccaaaagaacttattgactgggaattaaaagtcaaggaagacacggggttagacgagaaggaagacgaaaatcaagaaaaagaagtcgttcagcaacagaaagtcctcgagcaaattaatatgcttgatgacatgaaagaaaaggcccaaaaactgggccatgctgaaggctttgaggcagggaaaaaccagggttatcaggaaggctatcaggcaggattacaatcgggtatcgaagaaggtatccgtcaaggcattgctaaacaagaaccttttattaatgaatggcaaggcttattagctgaatttagacattcattaaatggtttagatagtgttattgcctcacgattaatgcagatagcactcacagcggccaaagaagtacttggacaacctgcggtctgtgatggctctgcattacttgctcaaattacactgatgttgcaacaagagcagatgtttgcaggggatccgcagctacggattaaccctaaacatatccctctgattgaaaaggaattaggcgattctcttaccgcccacggttggaaagtggtggctgataatagtatccatgtagggggctgccgtgttgtaaccaatgatggtgatcttgattccacaattgcgacacgttggcatgaattgtgtcgtcttgctgcaccggaggcgttgtaatgaccgcaagattggggcgttggttagaaaaactcgctgatgcagaatctcgtttaaataaaattccgcgcattcgccaatatggtcgcttaacccgtgctacaggcttagtcatggaagctaaggggctagttatgccccttggctctacctgcttaatagaacgtaccattggtaaaacggttgaagaagttgaaagtgaagtcgtcggatttaacggtagccaaatgttactcatgccactacaagaagtggaaggattaaccccaggtgctcgagtctacgctcaatcgatccccggtcgtgaaggcgaaggccgacaattaccccttggtgatgccttattaggccgcgtacttgatggctcaggtgatccgctagatggtttaccgccgccagataccagttatcgtgcaccactgattacaccacctatcaacccattacaacgtacccccattacagatgtacttgatgtgggtgtacgtgccatcaatgcactgcttacggtcggtcgtggccaacgtatgggactctttgccggctcgggtgtcgggaaaagtgttctattaggtatgatggcgcgttttactcaagccgacgtcattgtcgtagggcttattggtgaacgtggtcgtgaagttaaagactttattgagaatatcctaggtaaagaaggattagcacgctcggtggtagtagcagcacctgctgatgtttcaccactcttacgaatgcaaggtgcttcttatgcaacccgtattgccgaagattttcgtgatcgcggtaaacatgttttattaattatggattcgttaactcgctatagcatggcgcagcgtgaaattgccttagccgttggtgaaccgccggcgacaaaaggttatcccccttctgtatttgcaaaattacccgcacttgttgagcgtgccggtaatggcgttgatggtggtggctccattactgctttctataccgtgttaacagaaggtgacgatcagcaagatccaatcgctgattctgcccgtgctattttggatggccatatcgtgctttcgcgttcactggcggaatcgggtcactaccctgctattgatattgaagcgtccattagccgtgcgatgacctcactgattgataaaacacattatcgccgagtacaagtatttaagcagctattatccagttatcagcgcaatcgcgacttaattaatgtaggggcttatgccacaggcagtgatcctatgctggataaggcgattgccctttatccatcattagcaaaattcttacaacaagatattcaagagcaatgtagctatcaacatgcttgtgaacaacttaatcaactgatcacactagattcattctgaacataatcaggaaaaataaagagggttccaatgcgggagcagtcacctttagtgacactgagggaactggcacagacagcggcagaacaagccgctgtccaactagcccaagtccgccagagtcatcaacagatggaacagcaactcaatatgttgatcgggtatcaggatgaataccgtgttcgtctcaaccagacgttaaatgtgggaggcatgtcatcagcatcatggcaaaactatcaacaatttctcaaaacacttgaattaactatcgagcaacataaacagcaacttcgtcattggcaagcgcaactcgaccttgcaacggaacattggcgagaaaaacagcaacgactcaatgcgtttgagacattggagcaacgcgctgaagatagccgtaagcgacaacttgatcgtattgagcagaaacaaatggatgagtacgcacagcgtagtactttacggagaacaacttgatggagataacgcttctgaccatggatgtcacagcaacctctccgggaacgacatccgctacaacaagtcaacccggtgataatgcgtcgacatttgcacaacttctgagtactcaacctcagaatacacccagtgataaaaaaaacgcctctatttcaggccattcctcaaaagagaataaggcgcacaatcacactgaaaaaaataaagaccaacaaaatgatgacgatattgatactattgtcactgaatatgcggcattagaggcgccagcaacgaaaaatacccatcttgccctctcgttacctgataatgagcaatttagctcaattcttgaaaataaaacggcctcttcattaatgtccgcagaagaattagcggcagagcttccagtacaacttgccggacttgcagggttaaaatctacatcgctttcagccaaccaagctcatcagccacatttattgggaacctcgttaaagcatgctgggaatggaaacgagttatctcaccttatggcagaaaatgcccgtgctgaacgtgatcttgtcgataaatggcaacaattcaatacgcaagctaatgcagatgacaaatcattacttgctcaattacgccctgagacagcgtcattaacccaacttgcaacacatgaagctcgccatttaacgaatgggcattcagcaaagaaagttgataacgcttcactgttatcttccgtggcagaaaaagcggatggattgttagccgatgacaaagcatcagccaatacaaaattagccgataatctggcaaaccaaataatcggtaataaccgtattgctgaacgcgatctacacaatagattatcgacctcttcggtgtttgcctcttcatcagtagcaagtcatgcgcaaccgtcatcaatgatgcaagcgcaaatgcactttccttcgatgcctaccccgatgttaaatgcacaaataggcacaccggaatggcaacagcaactcaatcagcaaattgtgatgtttagtcgtaatggtttacaaaaagctgagctacgtttacatcccgaagagttgggttcattacatattcgcatgaaaattgaagatggacaggctcaattacatcttgcctctcaaaatggacaagtgcgtactgtgttagaaaattccctgcatcatttgcgtcaagcgctctctgaaaatgggatacaactcacacaaagtcaagtgtctagcgacagtcatgacggttggcaacaacaaaatatgtcagattcctctcaatttagtggaaatggtgccgataatcatcaaagaagcgagggtaattctatgcaattagcctcagaaacggcacaaaagataacccttacgcctcaagagttagcctctgctcgtggtggtgtcgatatttttgcctaatacaaatgtattgggaggacacactatgtcaataaacgtaagagttaatggttttttccctatctgtttctgccattaaaaaacagaaatagcgggataattaaggttgatttagatggatatggaagtccacaaaagtgaacacgtatccactacaaaacaggaatttaactgtccatgtctaattacagcaatgaacgtaaaagctatagcttaattctgatcatcctattattggtgatcgccattattgcagcggcattcggtggatatagttggtgggcattgaagcatgctaaatcaggtactacgggcactagtcagcaaaaagttataccggcccccgtttttatgtcattagagccttttaccatcaatctgattgatgaagaagaacatttagatcgcgtactctacatagggatcacgttacgcttacatgatgagaatacacgtaagcgcttacatgattatttacccgaagttcgtagtcgcttgctactacttctttctcgtcaacacgctaataaaattgcaacagatgcggggaaacaacaactcatgacagaaataaaagaaacgctgagaccgactcttgtaccgggtgaatctgaacagatcctctccgatgtactgtttaccacgtttattctgcgataatcattatgagcgataatatcctttcacaggcagagatagatgctctgctgaatgatgacacatcaggtgacgacgcccaaaaaagcgcgaacagggaacctgcgatagcgaaggatccgaatgaaccggatattcagccttatgacccgaacacgcaacgtcgtgtcgttcgagaacggttacagtcgttagaaattattaacgaacgttttgcgcgtcaattccgtatggggctgtttaatatgcttcgccgaagccctgatatcacggttggtggcataaaaattcatccttatcatgactttgcccgtaacctacctgtaccaactaatctaaatttggtgcatttaaaaccgttacgcggcacagcgttatttacctttgagccgaatctggtttatatcgcggttgataacctgtttggtggcgatgggcgttttccaattcccgttgaaggacgcgagttcaccaatacagagcagcgtattatcaacaaaatgttaaaactggcacttgatgcctatcgtgatgcttgggactccatcttcaaaattcaagttgaatatgttcgttctgagatgcaggtaaaatttaccaatatcacctcatcaccaaatgacattgtggtgacgacaccttttcaagtagaaattggctctatggtaggggaatttagtatctgtattccttttgccatgattgaaccgctacgtgaacggctaatcaatccaccaattgaaaaccttcgccaagaagatagcgtttggttagacagtttagtaaaccaagttaagcactcagagcttgagttggttgctaactttactgacattccgctgcgtttatcaaaagtccttaccctgaaaaaaggggatgtactccctattgataaaccagaaagattgattgcacatgttgatggtgtgccggtattaacaagtcaatacggtacagttcatgggcaatacgcccttcgtgttgaacatttaattaaccctgttttaaacgctctggatgaggaacaaaccaatgagtgatgaaaatcgcccaactgataattcacaatcggctgaggatatgtgggctgatgcaatggaacagcaaactggcaaaagccaagataatagttccgacgtattcgaacatctgttacctgaagatgatacgcttaatcatctatctgatatcaatttgattatggatattcctgtcaaattgacagtagagttagggcgtaccaaaatgacgattaaaaaactcctaagcctatcacaaggctctgtagtgtcattagatgggcttgcgggtgaaccccttgatattcttatcaatggctacttaatcgcccaaggagaagtcgtggtcgtttctgataaatatggtattcgcattaccgatatcatcaccccttcagaacgtatgcgccgtctgagtcgttgatctatggaacagatcccttccttttccagccaaggtgcggttaatactgccgcacccgccacaacgcaaactatccaaacaccggcgcaacctttacccgttggacaaagccttgtgcaagtcagcaccgcgcttgcgggtattattgtactgattattgttgcaatgtggcttttccgccgttttggctttgctcgcggtacatttaaagctaatcaagcacaactcacggttaaagcgagctgttcattaggtaccaaagagcgtgttgtcgttgttgaaatcgagcaggaatggcttgtattaggggttacggcatcgcagattaatctgttacacaccttacccattcctaatcatgcctcgcaggaagcgcctataccaccttcttcaccgttatttattcaattattacaaaaaacgctaaagcgagataaaggcaactcataatgcatcagtgtgtctcttattttaacgcattaaagcgctggcctctcttcgctagtgtccttattttgtcactattgccaagccatgcgtttgctcaattccccagtgttatttcacacccattaccgggaggtggccaaagctggtcattgccagtacaaacactgatttttatcacagccctaggttttattcccgccgtattactgatgatgacgagttttactcggattatcattgtgctgggtttattgcgtaatgcgttaggtacaccttctgctccccctaaccaagtggtactgggtcttgcgctatttatgacattttttattatggcaccggtgtttgataaaatttatcaagatgcttatctcccttttagtgaagataaaatcacttttgaacaagcactcgataatggctcacaaccactgcgccagtttatgatgcaacaaacgcgcgaaaccgatcttgcactttttgctcgtcttgctgatgcccccgcatttgaaacacgcgatagcgtacctatgcgaattttagtccctgcttatattaccagtgagctaaaaaccgcttttcaaattggttttatgatttttatcccttttctcatcatagacttagtggttgccagcgtcttgatggcactcggtatgatgatggtgccacccgccaccgtttcactgccttttaaactcatgttatttgtattagtcgatggctggcagttaatacttggctcattggctcaaagcttttttaactagcaaagaggttctttatgacgcctgaatctgttttagcattaggaacggaagcgatgaaaattgccttatcccttgctggacctctattattgtctgcactggttaccggtttagtaataagcatgctgcaagcagcaacacaaataaacgaaatgacactgtcgtttattcctaagatccttgctgtattagcggctattttagtcgcaggcccgtggatgctcagtttgttattagactatatgcataacttatttactggcattccaggaatgattggctaataacaatgataaccttgaccagtgaaatacttaatggctacatcagtgattttttctggccatttgtgcgtattttggcactctttagtaccgcgcctttgtttagtgaaaaacagacacctaaaaaatttcgtattggactcgcctttttaaccacggcgttaattgcaccagggctaccgcaaagtcaagtacctctcttttctatcatggctttttgggtactgatccaacaaattttaattggcacaattttaggcttatctatgcagttagcttttgcttctgtacgtcatgcaggagaagtgattggtttacagatggggctgtcatttgcgactttcgtcgatccttcaggtggcccgaatatgcctattcttgctcgtatctttaacatgttaaccatgttgctttttatggtgtttgatgggcatttatggctgttatcagtattagcagatactttctatgttgttcctattggaaatcagacctttaattcattgggtatccttactttagtacaaagtggtggcactatatttattaacgggatgatgttagccatgccattaattactctactattagtactcaacctttcattaggtattttaaaccgtatgacaccacaactttctgtttttgtggtcggtttccctcttaccctcacgatcggtatgttggcgttatcactgattatgccagcattacctgtgtttactgagcgtgtctttagcgatacattcaatcgtattaccttaatattgcagcaattagtttcttgaaaaaactgatgattgagattgtgttatctatttttccattggctaattaaatttaatctgctttttgtcacttgttttgtttattccacaattaatatatcatttgctataaaccagtgatgaataaagtcagctagataacttaatattcgtgctaaaggatcagcacgggcacttactgctactgcgactaaagtcatgcataaaccttgtactgacttcattcgttacagataaaaaaatcccctgataaatatcaagggataatcgcttattttatagaataagatgctatttactattacgactaaattaacgatacatcttaaacatcgacatctctttcatgtcattaaagactttataagatgcctgtaataccgactcttcttgataataatctgaaattgcttgtgtccaatctaagtcacgtaactcacttaagcgtttagcatttcttaatgaggtatctgcacctaaatcatctaaattatcaagttcttgaagctgtaaacctaatttagcttccacactagaaatattatttaatgtggcgcgattaacacggttagccgtattaatcttatctaatgcagcatcacgatcagcttgtggttttccaactagaggttcacgtagtgcactgatggcttcatctaaggcattaaaaatatctggctctgtgccttttcctcccgatgattgtaacgtttctatccctgtaaagttggataccatttcaatattgctatcaactttttgagtaatttgcttgtctccaccttgataggtgattttacccgttttgtctgcaacaaaaggtggtttatctgtttggaaaccagcaaaaacataacgtccaacaccatctttcgtattgccaatccccactaactgatcttttaaaccacttaattgttccgcaagagaggcacgatcttcatcacttaatgcgccatcattaccggcagccactaatgtttcttgaatttttgtggtgatattgaccatttggcttgaaaggctcatttgcaatgacatgctgtttttagcaaatccacgtgctgtcgcatattgctgattacgcgcttcagattgcttaaccattaccgcttgtgaggccgccatcggatcatcagaaggtttttcaacacgtcgaccactggaaattttattcccttctgtcatccatctactttgcgagctagtaatattatccactcgctgagtgtaaatttgatttgaacttaaacgcacgatttattccttaatcaaagagggtttataagacctgcataatcgcatcaaacatggtatttgcagtttgaataacttttgcatttgccatgtaatactcttggatacgatacatttcgccgtattcttcatccaagttgacccctgaaaccgattgttgctgtgttaaaatactgctggtgatcgcattttgcgcatcataatcaacttgcgcagtattcactttattacccaccatacttattagtgagccataaccaccagcaattgttgctttaccatcgataagtttttcatcgggtaattcgaacaattttttcatgttctcattatcactaggtccagagtcttttgtacccgcggcagctattttgcttggatcgctgattgcaacactcattcctgcaatcacgttgcctacagattgaacaacgatagaatcgccctcttgtgcagctccattgactttgatgctcattccttcgaattctaattcacccgttgttgcattaggtgttgctgtaaatttacgattccccggctctacagtgacattccatttaccaccttcatacttaaccgtataatccgcagctttaacttctcttgtgtcagtgtatttgacatcaaaagtcgcatcacctttgttcttaccattaggcatggtatgtgccccacctaggttgaagaacttatcacctttatcgccgtttaaatcaaaaccttgctcatgttgtttattaaattgatcgcccaacactaaagctaattggtttaattgatttcggcttgcatctaatacttcattacggctacggtaagcgccacctaattcaccgccattaatacgtttagcatcaacttcacggacttcatcaataccgttgctataaccaacaacaaggcgttcactgtttttactggaaggaatagcagagacttcataagagcgcgtccccgcaacaagaggaagaccattggcaaagctgacattaacaaatccgccgtcttgttgggtcacttgtacatcaaccagcgtatttagctcttgaattaaacggtcgcgttggtcgagtagatcattaggctcggcaccattaaaaccttgggagcggctaatttcttgatttaatttagctatctgcttggaatattcattaatattcttagtggtattagtgacttggctattaatgtctttttcgagatcgcgcaatgattgatccgctttattaaacatattcaccattgcttccgctttacccagtatggtggtacgagctgggttatcttccgcattgttcgttacattaggtaagctagtaaagaagtcatcaattgcactggaaacatcattgcctttatccgctaataaattatttatttgcgagatatttttgttatagctatttaaagcactctgttttgttaccgcacgattcatttgccccgcaaggaactcattatattcgcgatgaatacgactcacattaacaccatttccaatataaccattactggtcatcgtgccaccgttttcattaaatacggtcatttgacggttataccaatttactttttggttagcgatattattactaattgtgctcatcgcagcttgtgctgcattaagcccgctcatcgctgtattaattaaattgttggacatttgtctatccttttacgtttagtcatctcctgtatgttcggagcataactaggcaattgatatggatgctctgctatttgttatcggttattcccccctaaacttgaggggagaatagttaaaagagttcacttaaatcatgcgtataagttttcgcaacttgctcaccctgtccctttaattgccctataatagaaacaagttttttggcataccccggatcggttgcataaccggcttcttgaatatgataagcagcctgttctggtgttttggcttgcggtactttggcatagcgcgggctttccgtaagcaatcttagataatcttggatagcctccacataagagccgtagacacggaaattatcacgcatcttgatcgatttaccgtcaatcacttccgttgtcataatattagtgacaggccctttccaataacgccccgctttaataccaaacaggttgtagctcggttttccatcacccgttaaaatttctcgtttaccccagccagattctagtgccgcttgtgctacaactaaaagatgatgaatacctgtaccttgtgtcgcttgtttagcaggccctaacaatttagcggcaaaagaagcgctactttcagacaatccttttaacttgcctaccgtactttcaactgcattttgtaacggttgcatcgcacgatagagctggcctaatgcttgtgttggcattgattgaaaaatatcactgctgtctaatggcatcggcgttttaccggccagttcgctcggttccatcgttactttagctgacagttgtttttcaatcatgtcagcaaaccccaagccttttttggataaatcttgagcaatttgctgatcataaagagaggtgtacattttagtgctttctgaattgaacatactctcttgtggaatagcttcacgcatactttttaacatcatttgcacaaaaaccccctcaagttgctgcgccacttggcgcagtccttgctgatcggcattttgtccaacctgatatttaagtttattcaatgcgttactatcatatgccggcgttgaaatattcggcattgaagaaagcagagataactctttcatcagataatctccaatctcgcccgtaaacaacccgcactttccatcgcttgtaatatcgacatgagatctgttggggtcgcacctagcgcattgagtgaacggatcacttcattgaggctagcactggcgttgactttttgtaatgaaccacccttttcattgacattaacactcgtattacgtgacacaaccgtactgccacctgcaaagggggtattcggttgactcacattcacttggctatctaccgtaacagataagttgccttgtgcgatggcacagctacctaataccacatcacggttcattacaacggaacctgttcttgcattgataatcactttagcatcagcaataactcgttttacctcaaggttttgcacatctgctaagaaacgaacttgttcacttttaccaagaggtacacgtaattgcaccgtacgggcatcaagaggaagagccgttcctacccctcgtagtttattaatcgcatcagcaatactttgtgctagcgtgaagttttcttcgttaagctgtaagtttaataatcccgtttgaccaaactgagaaggtaactcacgctcaataatggcaccgttactaatacgtccacccgctaattgattgacttttacgctactgcctcccgcagaagcaccagagccaccgacaacaatgttcccttgggctaccgcataaacctgactatctacccctttaagtggggtcatcagtaacgtaccacctcgtaaacttttggcattacctaatgaagaaacaaccacatcgatagattgcccagtacgaccaaaaggaggtagttttgctgtcaccatcactgccgcgacgttttttaactgcatattggtgcccgcaggtacggtgatccccaattgtgagagcatgttatttagactttgcgtggtaaaaggtgtttgcatggtttggtcacccgtaccatcgaggccgacaaccaaaccataaccaatcagcgcattttctcttaccccttcaaccgaagtaagatctctgatccgttcggcatgggcagaaaagccgacacatgtcatcacgataaagaaaaggctaatcgctaattttttcatctagaccctactcgttaaaaaggtgatacatttaagaagaaacgttgtagccatcccatggattgcgcttcattaatataaccgtctccgatatattcaatacgcgcatcagcaacttgggttgaattgaccgtgtttgagccactgatagtgcgcggattcacaacgcctgaaaatcgaataaattcagtgccttggtttatcgcaatttgtttttcacccacaacgtgtagattgccatttgccaataactgatcaaccgttaccgtaatggtgcctttaaaggtgttatttgcattagcaccacctttaccaccgaactcactgtttccttccatgcccatatcagtacggctattccctaataatccttctaagaaccttggtgtgatagaagcaaggaaaccggctttaccattgcgactggcattcgccgacgagtttttactggcactgacattttcttgcaaggtgatagtcaatgtatcgccaatatttcgcggtcgcctatcttcaaataatggctgataaccaaaataaaccggctgagtagcctgaaaaatagagccattaggtgctggtgtggtaggcgcagtaggtattgccgtggtgtgtccttcaaccaatggtttttccggtatctgagcgcaccctgctagtgtcagtaccaacagggcggtacctaaacgttgatgacgacgccatctgacactaagcttacttgccccagaattgtcagtaatgacctttgtatccatcttcgatactcttttagtaatacgcctgacagaaattctgtcaggctaatgaatcaacgaaattagagttgcgtgagtttctgtaacatctgatcagaagttgaaatcgctttactattaatttcataagcacgctgagtctggatcatattgaccaattcttccgcgacattaacgttagaggtttcaacatatccctgatataacaagcccgcaccgttaatacccggcgcattctcagtaggtgctccggagctggctgtttctaagtacagattttccccaacactttctaacccgctatcattaataaatgtggtgagggttaattgccctacttgttgaggtgcaggcgatccttcaatctccacactgacaataccatcacgacctaccatcacctttttagcggtttctggcaaaataatcgctgggacgatttgaaagccactggaggtcactagttgcccattttggtccatttgaaaagagccatcgcgagtataagcatccgtaccatcaggtaattgaacatggaaaaaaccttgccctttgatagcaacatcacgcgtaccattagtttgggctaaattaccttggctatgtaaacgttctgtcgccactgggcgaacaccagtaccaatttgtaaaccagaaggcgcattcgtctgctcggatgtcatcgctcccggttgacgaatagtttgatagagtaaatcctcaaaaaccgcacgctggcgtttaaaaccatttgtgctgacgtttgcgaggttgttggaaatcacatccatgttagtttgttgtgcatccaaccctgttttagcaatccataaagaacggatcatggttttccccttacactatttaactcattgatagcaattggttagcgcgctgcgcattatcatctgcactgtggatcaccttcatttgcatttcgaaacggcgggcattggcaatcatatcgaccatagcttcagcaggattgacgttgctaccttctaatacaccagcaaggactttgacgttatcgtccgcaggtaacgtttcacccactcgtgctgtaccttgaggtgataggtgaaatagaccatcatcgcctcgtaccaaatcattttgttctggcttcaccatttttaggcgaccaatttgccctagcatttttggtggatcggtagggacatgagccgtgacaatgccgttattagcaatgctaatttccgcttgtggtggcacttcaattgcgccattatcgcccatcaaaagacggccttgtaccatcaacatgccatcagcgttacgctcaatattgccgtttcgggtatacgcttgcgtaccatcttcaagttgaacagccaaatagccattatcacttaacgcaacgtccatcggtctgccggtgtaattcatcgttccctgacgctgatcactaccgggcgttgacgcgacggtaagtgtacgcgtcggtaaggtttcgccattgataggtacggctcgcatcgcactaagttgcgctttaaaccctggtgttgatgcatttgctaaattgttcgccacgacagcttggttttccattgagtgtctggcaccgcccatcgcggtataaatcacatgatccataacagatgatttcctgcgttattagcgcatgctaactagtgtttgcaggatctgatcctgagttttgatagtctgcgcattagattgatagttacgttgagcaacaatcatgttaactaactcttggctcatatctacgttagaggcttctaaggcattgttggttaatttaccgaatacgccagagcctgccacaccaacaatgggtgagcctgaaccattggtttcagaccacatattgtcaccttgtgaacttaagccaccaggattggcaaagttagctaatgcgatttgaccaaccacttggctttgttggtttgagtaggtcgccataatggaaccatctggctcaatacggaaattggtaaattcccctgcttgataaccattttgcgcgagtttagagacacttgattcagcgactttttgctgcgtactaccactaaagttcatttccatatccatgggttgtgaacctttataagcaacggtagtaaagtttttcagcttaggtgctgtttcatctaataccccgttatccttataaactaatttacccagatcttgtgctggctcacctgttgtggtgtcttgagcataaacactccattcgttatctttggttttaacaaagaataagttcaggttatgttcattacctaagctatcgtaggttgtcacgttagtactaaagttataagaatcgttatctttgggatcaaatttatgtgttgtttgatcgatagcctcttcagctgaattcaagttaaccgtcatatccattttatcggttgcacttgcattcatcatatcggtaggaataatgataggcgttggtgttgcccctttttgtaccacatttttaccgtctacgttttgtactggataacctgtaatacgcataccttgcatattagtgagatagccgtttttatctttgccaaattcaccattacgtgaatagaaaacgccaccgttactatcttcaatacggaagaaaccaccaccagaaatcgccacatcggttgggcggttagtagtagtgatactaccatctttaaagttttggctaatgcctgatacttttacaccaagccctgcaccagagccggcaaaaacatcggcaaaagagactgttgcccccttaaaaccgtaggttgcagagtttgagatattattaccaatagtatctaaattagcggctgctgcatttaaaccactgactgcttgagaaaaggacatgcgccctccattattgaattaatgttgattaaaaaactttacgaatttcgtccaatgaaacgatgacaccgaggccaacatcaagatgaggttttccctctttcatagaaacggaattgactaccgcacttttaagtgtttttactgggacttgcgcatcattaaatgtggcatttactgtaaattgatattttccagtaggaactttattaccatcatcatccgtgcaatcccaaaagaagtgataaacatccggcagaatttttgaattcatttcgatcgtgcgaactttagccccactactatcagtaatattgactgtaagcgtatctattggactaaaggattcaaaaccaaaggcgctggagaagatattttcattatctgtcgcatcagtagatgcaggtaacttatctaattgagtatcaggtgttgtatctgtatctatatctgtatcagatccagcgttttcaccattattaatcttatcaacgctgatttcattaccggcaatcatcaccatatgattaaccaatgaggtagcacgtaatgcctgactttggtcaatttggccaacaatggtattgactgttttatttagcgtctctatcccttcaaccgtagaaatctgtgctaactgtgacgttaactcattattctgcattggattggtgggatcttggttttgcatctgcgtgataagcaacgtcaggaaattacctttaatatcatcactccccccttttttagtgtggtaggatgaaggcgcttccccgataatggtattatcagtaggttcattcattgaggcagaaatacccacaatttattctccctattgacctatcattagcgttttttgcatcagcgatttcgctgtattcatcacttcaacgttagcctgataacttcttgacgccgaaatagtgttgatcatttcaccgactacatcgacattaggcttacgcacatagcctttttcatctgcaaatggatttcctggctggtattccatacgaaagggtgtcggatcatccactacttgcgtaacatgaacaccaccaatatcttgacccgctggcgcattcacttggaaaaccacttgttttgcacggtaaggttcaccatcaggccccacaacgctatctacgttggccatattacttgcactgacgtttaaacgttgtgattgtgctgaaagtgcagaacctgaaatatcgaaaatactaaataaagacatactctttatccttgttgcaatacagccatcatgcttttaacttgagagttaataaatgtcacatctgcctgatatttaacgctattatcggcaaaattactccgttccatatccatatcgaccgtgttaccatccatcgatgtttgatgaggaacccgataaagcaaatcagcctctaagcgataacccggcttaataggaatatggcgttctgatgtcattgtcagttgcaatccatgactaccagtacgcccgttttccatggtttttttcaactcagccgcgaaatcaatatcccgagcttggaagcctggcgtatcagcattagcaatatttgccgccaaaatttcttggcgtttattacgtagtgaaagcgcttcttgttgaaaatgaaacgtattttctaatttatcgagcatcttctatccttggtggctaaaccactcacctcagctgataaaacaatttcagttaacagaataaacgctcaaaaaaaagatgattggaggaataggggtaaattgaattgctatttatgcgtttaaggtatgtgaagaggatgtacactattttggctaaataagtttaaccacaccattagcataaactttataaggtgatacaaactatgtctgttagaacgtttatcggtgttatttcttttttctttatagtaaatagcggtatagccaatcccctacccgaagcgctacagcaatttttccaaacgcgccaccacaaagacgataaagtcaccgtaaccgttttaaccccagaggataaatggccacattgccaacaacaagaaatcctacagcatgcaggctctcgcaattggggacgtctttctatccctattcagtgcgataatcaacgtcgttttatacaagtagatgtgagtgtttatggacaatatttagtcgctaaaaaagagattaatcgtgatgatgtaataacaacatcttcgattaagatcataaaaggagatttagaaaagctaccttatgacgtgttaagagatgctgtttttattaaaaatgccattgctatgcgccatattgcgaccgaaaaaccaataacatcaactatggttcgtcgcccttgggccattttagcggggcagactgtaacggtttttgcacaaggtgatcactttcaaatccgttatgaaggaaaagcgattaacaatgccgttgccaatgaaagtattcgtatacgggtcaaatcagggcaaattattactggtgaagcgctggaaaatggctctgtacgtatccccttgtaatacattaaagataacaattaaaggtaacgataagcagaataagcctatattaaatgacttgttaaccgttttaatgatagcaaggcaaggtaaactctcttgcactataagttgaataaaaacgctgcttgtagactagtgctaatgagtacgctacagcttgaagtacgacgagaaaatactctaaataattcaagttataactaggcggcaagcgaatgagttgctaggagcatacataagtatgtgactagtgcgaatgagtgatgccaacaacgctacagcttgaagtatgacgagaaaatactctaaataattcaagttgtagctaggcggcaagcgaatgagtcgctaggagcatacataagtatgtgactagtgcgaatgagtgacgccaacaacgctacagcttgaagtatgacgaaaaaatactctaaataattcaagttgtagctaggcggctagcgaatgagtcgctaggagcatacataagtatgtgactagtgcgaatgagtgacgccaacaacgctacagcttgaagtatgacgagtaagataacattaaagtttatatctacactgccgatataaaactacaagatgataggcgaaaacacataggttgtttacaatggcttcatctgacgattaattgatgcctaacaaaggattttcctatgagtattgaacgcacaaatccacttatcccaatcacggccatttctcagcgtaaccttaatgaaggtgcccaagaagcacgaaaaaccggtaatacgcaaacaaaagcaatggcgggtgatacttctgtgaaactaagtgaagcacagaaaaaattagttcaacctagcaatcaagacatcaatgtcgaaaaagttgcccgtttaaaagcagcgattgccgatggaacattaacaatggacagcagcaaaattgcggaagcacttttccgagaagctgctgaaagcataactaaataatattaaagattatgatggaagaactccgccagaccttagatcttcagttatcacagctcaataccattgcgggtattttacgtgctgagcaacagttattatgtgcaggaagtattgatatcaataagctgcatgaactaactgaacagaagaattttgtattaacagctctaggtcataccgatcaaaaacgtcaaatactcagtaaacaagttggtattgatagaccctatcaaggacagccttttttagctgatttatggggacaactggttgatctaacggaagagttaaaacatcttaatcaacacaatggcttattgttagagcaacatattactcgcaatagtgaaacgctacattttctacagaaaaatcatagcccaacactttatggtgcagatggacaagcacagcgttcaatattagctgggcgaaaaatacaaatataattatcttttataattaaagaatagtccctgtattatttcaatataatacagggagtgttttgtttaatatattgatttatatgtaacaaccttcagataaatattgaattagcgttaggatttaaatcgatagtaataataagaattatattttaaattaaaatagccttatttgtatttactataatctataatcgttgatctacctaatttatattttgttcccccctctaatcttaattcctctgttcctattaacaagtttttaccttcaatatcaactttatcatcatttaattgtaatataatacgaccatccccctggattttaccaccaagaaatatactatcctcagcgaggatatgaaaaacactattatacgacaatgatatattacctattcctatggttcctactcttccatataaataactatcatcaatattaaatgttctatctaaaagcaacctatccgctttcataaatagaatactatctttaacattaaatgatgaattattaagaacagaagaatattgataaaccattacttttgattgtttcgtcccatcataagctgttctatataaattatcatcttgatttatatctatgtttcctgtgttaattaagctataagactcatgatttagtgacaaagtatttatattaccatgattataaacgttaccctgttttgattttattattaaatatcgactatttattcctgcctctgtccttaacaaaaaatggctgtgtttattataatcatttttagctccaagattaaactcacttaaccccatatcaaaacgaatatattcagcatttaaatcaccgtcaatcaagtctacattattagagataatatttatcattccagatgaaatatctttataatttcgattaatatgcatatgttcatttttatctaatttatttctcatatcaaaaacaacactagaacctatatctgctatagtgaatgtcttagaaaatttccctgtactgctacctgcaattagtttaatatcattaattccagagaaagaacaatcacgacaagaaattccattaggattagctataaccactgttgccttttttccttgtaactcaagctcacctctcagaattgaaaaatctttagaaacaacctcattaataattaattctgcttcagcattattttttaatgataaacccaaattaccaacatcaagacgattataatagatatgggcggtaccatcttgattagtatttatcacttcaatttgtgttttccctgtgtcatcattaatagatacttttgcatctgataatgaatcagaatgtaaaataacatcttgataagcatagcaagataatgaaataaatacagataacagtgagacagtaaatagagcgttttttttcatggacatttcctttggttttaaaactgattatcataattagcacaaggaacaattaatttaaaaaaaaatccatataaaaaacatatagacaaagcatttaaaaaaacatataaataatatattaatgattaagtattcatattaaaaaatacaaataatatttttatatattaataataagatatataaacagccctattaccaaacaagctattaatatttaattttctttctattattctataagcttctttatcaaaataaatctcaccatatccatgtttaatattgcttttatttaaaacatattctatatatagaacaattacttatattcttcttgtttaaactaaaaaaaaccactaaatgatgatttagtggttttagtagatttttatcaatgattaataattaatgattttgtccaccaatcattgatgtcatacgaatatgacgaccttcgctaatttccatatttgataataccgctaactgtggcaagctacggcgtaaaaagcgcgataacagcgaacgtagtgcatggttaaccaagagtactggcacgccccctgacatctcttgacggcgtaccgcatctaaggcttgttgttcaatgttttcagcaaggccaggctctaatccccccccactttgcatcgcttgtaataatagacgctctagtcccgcatctaatccaataacttgtatctcttctttatcaccaaaccagtgttgtgttatcgccctgcgtaatgcaacacgaactaccgccgttaattctgccggatctttttgctcaggtgcatgctctgctagtgcttctaatatggttctcatatcgcgaataggcacttgctctgccaacaggttttgcaatactttatgtaacaccgttaatgacagcatatcggggatcatattttccgtcattttcggtagttctttgcttaccctatcaaatagcatttgcgcttcttggcgaccaaataactctgatgcgtattggttaagtacatgattaaaatgtgttgcaatcactgtacttgccgccacaaccgtatagccttgtacttgtgcttgctctcttaaactgtcatcaatccatactgcaggtaaaccaaatgccggctcttgagtgttatcaccttctagcgttcctactgcattaccggggtttatggccaaccaacgcccaggatgagcttcgccatggccgatttctacccctttcattaaaatgcggtaggaggaaggttttacttccatattatcgcgaatatgtacaacaggaggtaaataccccatttcttgtgcaaactttttgcgaataccactaattcgacctaacaattcaccattttggcgattgtcgaccatgggaataagacgataacctacttccattgacagcggatcttctaattgcacatcttcccaagaggcttcaacaacccgattttgtttttcaacttgttccaactctttttgttgttgcacttgaggactgctatgacgttttaagatataccatcctaatcctgctaatgcagccgtaaagaagaggaaaacaaagtttggcatacctggtactaaccccagcaatcctaaaacacccgcagttagcatcagtacacgagggttatcaaagagttgcgtcaccatttgttgaccgacatcttcatcggttgcaacgcgagtaacaataacacctgccgctgttgatataatcagtgctggaatttgagccactagcccatcaccgatagttaataaggtataagtgcttgccgcatcgttaagtgccatattatgttgtgcaacaccgaccactaaaccaccaacgacgtttattaccaagatcattaagccggcaatcgcatcccctcggacgaatttacttgcaccatccatagatccataaaagtcagactcaagcgagacttctttacgacgttttttagcttcttcttcgtttatgatcccagcatttaaatcagcatcgatagccatctgcttacccggcatcccatctaatacaaagcgtgcgcctacttcagcaatacgccctgcacctttggtgataaccataaagttaatcagaataagaatgataaagacaacgataccgatagcaaaattgccacctacgaggaaatgaccaaaagcttcaacaacacgccctgcagctgctgaacctgtatgtccttccatcaagataatacgtgttgatgcaacgttaagcgataagcgtaacaatgtagtgaacaggagtattgtaggaaaggcagcaaagtccaatgtgcgcctagtaaacatggccactaatagcaccatgatagaaagggcaatgttaaaggtaaacaataagtccaatagaaaaggtggcaatggcagtaccatcattgacagtataagcaaaataagtactggccctgccagtatctgccactgagaacttttccaatttcccggcaagcggagtaatgaggccaaattagccatgacgattatcttctccagcaaagtccagtgcgggaggcactggcaagttcataggttgtttaggttttaaaccaccttcggttttccatcgtctcagttgatagacccaagctaaaacttctgcaacagcggcatagagtgttgcaggaatagcctgtcctatctcactgtgacgatataacgccctagcaagcggtggcgcttctagaagcggaattcgatgttcagcaccaatttctttaatttttaaggcaatggcgcccgctcctttagcaagtacttttggggcaaccattttgtcgttatattgcaaagcaaccgcgtaatgcgttgggttagtgacaatgacatctgcttttggcacatctgccatcattcgtcgccgcgacatctcgtgttgttgttggcgaatacgcgcctttaattgcggatcaccctcttgttgtttaaattcgtctttgatttcttggcgtgtcatgcgtaactttttcaaatggctacgaatttgaaaaataatatcgaatgccaccatcgggataagcataaaaaccgcaatatagaccgcaaaaataagcagttgcatcgcattagctaaagcacttaaaggaggaagcgtgatcaaatgaagaatatcgttccagttgtgccataagaaaaccgttgcggctaagccgacaaagagtgattttaaaatcgctttaaataattcagctaacgcattcattgaaaaaatacgttttaagccagaaatagggttccattttttcggatcaaacttgatagatttgctactaaaattaatcccccccaatacggctgaaccaccaattgccactaagaccaagcctagaaacactggcgataacgcaaatacagcctgtttcattaaactggcaaaacgggggatcaataaattctcgttgccgattatgtggtgattaaaagtaaaaccttccgttaacatggcataaagctcacgagtgataaaacgcccactcatccacagtagactgacgccccctaaaatcattaatacggacgaaagctctttggaacgaacaatttgcccatcctttttcgctttttcccgtttatggggagtgggttcttctgtcttttcgagatcgctatcttcagccacagtctgtccgatttagataattagattaaagcctgaatgaaatgtctcttagcatgacaaattcagaagaaattgatgggttgaacaatcgcaaatttacggggctttttgggctatgaaggtataaacagcaaaaaagtgtgctacttacacatcacctttgaaacaacatatttatttggtgcaaatatggagggtttatcgcaagaataattctatggtgaatataaggtaaaagcgtgtatttctcaccatcaaacaaaagccgcttagataaagcggcttacattttcttcaatagcctgcgctattaacctgttttttggttgttttttatccataaaatagaacatcctcaaagagcagagatagagcgaatgcctcctgcaagccagttatgtccttatcgccctaaactcaccaatagattagaaacctaaactttccagtaaatcatcaacctgatcttgattcttaatcacaccagcattgtttttattgacttgtgggccatttaataatgaatcagtctcttttttcgcattggatttttcaagttgctctggtggcagattttccattaataccataacaagttgtttttcaatttcttgaaccacactcatcatacgtttaatcacttggcctgttaaatcttggaaatcttgcgccatcataatttcaagtaattggctatttgtaaaagccgcactttcagggatatcccgcaaataattgcgggtatccgttacaagagagcgtacatctttgagatcttcaggatgctcaaaccattgatcccagcgttcagttaacttagttgcatgactacttaactcatcctgttttggttgcgcagcttccacacaatttaatgtacgctcagctgcctgagcggtcatttgagcaacatagtccaatctttcccttgcatcaggaatggcttctgctgcttctgctattgctttatccaatcctaattctcgcaaactgtcgcgtaacatacgcgtcaattgtccgatccgactgataatatctgacgttatttcgacattatctttcggcataattggatccccactcattgcgactccttagatgcccagtttttcaaaaattttattgagtttttcttcaagaatggctgcagtaaaaggtttaacaacatatccacttgctcctgattgcgcagcagcaataatattttcttttttcgcttcggcggtcaccatcagaacgggaagcgttgcaagccctgcgtcactacgaatattcttcagcaactctaacccatccatattgggcatattccaatcggtgataacaaaatcatatgccgaactctgtaacttggctaacgcgtcagcaccatcttctgcttcttctacgttcataaatcctaactcctttagtaaattacgaacgatgcggcgcattgttgaaaaatcatcaaccactaaaaatctcagatccttacttgccattgaaaactccttcaaaatatattggcaaattactgtgttgctgtttaaactgaacttaatcagatacgcaatgattgtgttgtgctgattttcatcagcacggctttactcattgagcttatactttttacctcatctacggctcccaattcgaccgcggaacgaggcatcccaaagacgacgcagcttgcttcatcttgtgcaaatgtgtagctacctgcacgacgcattgctaataaacctgtagcaccatcactgcccatccctgttaaaatgacaccaatagcattacgccccgcatatttagcaaccgaattaaatagcacatcaacagaaggtcgatgccgatttaccgcaggatctttatttatatggatctggtaattagcaccattacgacgaagctccatatgataatcacccggtgcgatgtaggcgtgtccaggtaaaaccctttctccatcttcagcttctttcacactgatttggcataaacggtttaaccgctctgcaaatgagtgggtaaaccccgccggcatatgttgggttattaatactgcaggactggtaataggtaatggctctaaaaaatgacgaatagcctcggtgccccctgttgaagcaccaacagcgattaacttttcactcgaaatcatgggagtaaatgataacgacttagacggtaatgttttcgtttcatgacgactaattcttgcctgagccgctgctcgaattttttctgcaataagttcactgtaggccaacattccttcacgtagacctaactgaggtttagtgacaaaatcaaccgcccccagttctaatgcttttaatgtcacttctgaacctttggctgtgagtgatgaaaccatcaccactggcatagggcgtaagcgcattaatttttccaaaaaatcaataccatccatgcgtggcatttcaacatctaacgtcaatacctgtggattaaacttttttattaagtcacgagcgactatcggatctggcgcacaatcaacgacctccatatcatggtgactattaattatttctcgcatgatctggcgcattaacgccgaatcatcaacacagagtaccgttattttattcataacctctccttgctggtgtcagcccgtaaaccgtatgcccctgcaagtaaaaatccttgcttagttggctcacattttcagaatgccctacaaacaacattccatcgggtttaagcaatggtataaatcgatgaagtaagctttgctgtgtcgttttatcaaaataaatcatgacattacgacaaaaaatcgcatcaaatggcccttctaatttccactgcttgtcaagtaaattcaaatactgaaaagtgaccatttcacttacttgtggtctaattttcacgtatccggcaaaatcaccaacacctttgagaaaatattttttcaaatattcttcgtttaacgtttttaactcttccagtcgataaacacctttacgggctttttccaacacattagtgtcgatatcgctggcaataatttttgttttataggggttatccccaaaaacatcgcgcaaagtcatcgctattgaataaggctcttctccagtagatgcggcagcacaccatactcggtaaactcctcctgccctgtttttggcgtgtttagccaaaataggaaagtgatgtgcttccctaaaaaatgcagttaagtttgtggttaacgcattaataaactcttgccattcagggttgcatacatcactttttagaaacgcaagatagtcaccaaagttattcatccgtaattcacgtaacctcctcgtgagacggttataaaccatttcccgtttgttgttagtcagcacaatacctgctttttgataaatcaattggcagattgattgaaactgatcatcggacaacataaaccgttcagaaaaaaaatctaacggttgagcagcgatatctggcaattcttcagtaacattacgtttcattattttttaatgggtctttttaaaaaatgattttttatctgctttcttcaacccattaccttctaaggagtgagaagatccgtcttcatccgtgtcaggcaattcgaatgccgatacagcattaaccaggttgttagcctgatcttctaatgctgtggcagcagatgctgattgctccaccaaagcagcgttttgttgtgtcacctgatccatctgactaacagcatcagcaacttggtgaatacctctactttgttcgtctgaagccgaggcaatttcggccattaactcagtgactttatttacagatgtgacaagctcctccatcgtttgccccgcatcatttactaatcgagatccctgagagactcgagacacagactcgtcaataagtgttttaatttctttagccgcttcagcactacgctgagcaagattacgcacctctcctgcaacaactgagaaaccgcgtccttgttcacccgctcgcgccgcttctaccgcagcattaagcgctaagatattggtttgaaaggcaataccatcaatgacactaataatagcgcctatcttttgagaactttgagtaatagcatccatcatttcgaccacactgtgagtaatttcaccgcctcgtagtgcagtttcagatgcagattccgccaacttactcgcttgtaacgcgttatccgcattttgtttaactgtcgccgttaattgctccatactcgcagccgtctcttccaaagaagcagcttgttgttctgtgcgcgaggataaatcggtattacctttggaaatttcttgaatacccgaatacatcgcctgactgttatcacgaacaatacgaatagagcgcgccaactcgccacgcatctcacgtaaccgtctaaaaatgtcacctatttcgtcatcagtaaaaaccagaatttcacgatttaatttgcctgttgcgacatcattaaagtaacggcttaaacttgcgaaaggtttaataatattaaaacttaaccagcgatgagaggcgattgacaccacaattaccatggtgattgcgccaataaacattaaaatagcgatagtataaaaatgatgtccttgttctatcgaatcagccacttcgtgttgaacgtaattcatataggtattaaatgaattttccattgcagtttgatagcgttccgttggttgatctaaaaacccttgaaaatcgcctttttttaacatgccatgtaattcaactagtgcactataaagaacgtgataatcattttttacggtattaaaaatctctttttcttcttgtggaataacctcttgattaatatctgtaaggaaattttgaaaatgagtatttgctgtttccaaacgtgataatgcgattgattcaatagattggatataatctgttgactgttcagttttcattcctatcgcaacgcgatttattgcattacgtgcttgtactaaagatacccaacttaatcctaattcatctcgcttagcagtatctaaatcaattctagtgatctgattgttgtttaaatgaataattcccagtgagatcccactggaaataacttgcatcacacaaaacatcatcagtaataaatagagactggtggatatctttaatttacgaaacctaaacatgccttcacctcgttataagcggtagcaaatcactaccgcttgtcagccacttgttgttgttagaaagtttcccagttagcgggatcttcaacactgctgctctttttcttttctgaggttcctggttttataagtggagcagcggcttgtactacagggggtgcatccaattcctttttctctaatgctttttcttcctgacccggtaatttgaagatggaaactaagcgggttaatgcaactgcttgatcttcaagacccgcagcggcggcggcagattgttctactaaagaggcgttttgctgagtaacacgatccatttcagaaaccgcaagacccacttgtgaaattcctcgactttgttcatccgatgccgaggcaatttcccccataatatcggtaacacgtgtcacagattcgacaatacgagtcatggtttcccctgcactttcaactaataccgatccggtttcagtgcgactaacagagtcttcaatcaacgtttttatttctttagcagcttctgcacttctctgtgcaagattacgaacttcgccggcaactaccgcaaatccgcgaccatgctcaccggctctcgcagcttcaacagccgcattcaacgccaaaatattggtttgaaatgcgataccatcaatcactgcagtaatatcggtgattttttgagaacttccggctatgtcgtgcatcgtttgcaccacattagccacaacttttccaccttggcgggcaatatctgaggcatcattggcaaggttacttgcttggcgtgcattatcagcattttgttttactgtcgccgttaactgctccatactcgcagcagtctcttctaatgaagcaacttgctcctcagtacgtgaggataaatcattattacctgcggcaatttcactggtgctgttatagatattctcagtactttgataaacaccacgaacagtatgtataagctcttgttgcatgtgctttaagccacttgctaataagctcatttcattacgtccatgtacctcgatatcgggacgtagatccccttcagaaaatgctttaatatttaataacaatgaattaagtggtcgaattaatgcattgcgtagtgcaaaccaacaaatgatgagtgctgtaacaacaataatggctaatatcaccatcgtgataatagaacgctgatgagaagcttctaatgcactatttaattgattattaaacttctcattacgcataacataagcaagatactctttataaaaaccatcttgataagaagtcgttggttgttcgaaaaaatcttttaagtttttatcttgcagtaaaatttctaactgatttaatgcagaaaaatactcaataaaacgcccttttaaattgcgtatttcttcttctgaatgaatttgataagcatttatatgctgttcaaactctttaaatttatcatcggcccgagacatatttttacgtgccagaccagttaaatattctacagacaacgagctatcaacattcagatctttatcctgtaacagatagcttatagctgcacgattgatattgttacgcgcttgcaataagtttgcccagctttcatctaaacgttcacgctgtttttgtattgtgagagttttatccagatcttgtcttgtttcactgagatttgagtaaaaaacacccccggagataaactgcaaaacaccaaacaacagaagaatggataacaacccagtcactattttcattcggctaaacatgagtttccctttttataatagatggtatgaccaagttatcggcagacttaagagaaactttataggttttatcctatatagatactattttctatttacaataaataaattaaatatcaataagttatattttaaattctcattttaaaaacctgctaggcataatgcacattcattttttagttaatacatttaaaaaaaataacttaactaaaattaaaagtactctttctgctttaatttcacttaattaatattaaagccccaagaaataacaaataattgaaaaaactattccggcaagatagccggaacagtattaaagaataagattaataggctaaactttatttagccataattgttgcgctatcaactaattccatttcttcgctattgagtaatttttcaatatcaaccagaattaacattctttcatctaaagtacccaatcctgttaaatattctgttgacattgttaccgcaaattcaggagcaggacagatttgttcaggttttaaggttaatacatcagaaacaccatcaacaacaatgccgacaatacggttgagtaaattaaccacgatcaccactgtgttgtcattataggtaacattttcttgtgaaaacttaattcgtagatcaacgataggtacaataaccccccgtaaattggtcacacctttaataaaactaggtgcattcgcaatacgagtgacttggtcatagccccgaatttcttgtacttttagaatatcaatgccatattcttcgttgcccaacgtaaaaattagaaatccttgtccaacagtttcaccggataatttctcgaaatgttccgcagccataatcttattttatcctcactattaaataactgtatgcgcagttgtattctttttcttttctgtcatttgagaatgacttaaacgttgtaattctggaacatcaagaattaaagcaacactaccatcgcccatgattgtggcagcagaaatacccggtacttttcggtaattgctttctatatttttaacaaccacttgatgttgaccaactaacttatcgaccaataaagcataacggcgccctgcactttgtacgataaccgcaatcgcttgagtaatatcggtttgcgcaccttcaatattaaaagtacggtgtaattcaataagcggtaaatattcacctcttacttgcaataatttttcatctcctgctaaaggataaatatcttcctcttcaggttgtaatgagctaaccactgttcctaatggtaaaataaatacttcatcattcacttttactgacatgccatctaaaatggccaatgtgagtggcagcaagatgcgaatgcgtgtaccttttccaacttcaaaactaatttgaatttgcccccccatttcttggatatttcgttttacaacatccatacccacaccacgtccagaaacatcggtgacaacctcagcggtagagaaacctggcgcaaatatcaacatcgcaacttcttcattgctcatattttcagaaacagctaagcccgatgatatcgcctttttcaaaatacgctcacgatttaatccagcaccatcatctgtcacttcaatacaaatattgccaccttgatgctctgctgaaagcgttaattgacccgcctctggtttgcccgcggcaatgcgatcggcaggcatttcaataccatgatcaagactattacggactaagtgagttaaaggatcgatgattttctcaattaaacttttatcaagttcagttgaactaccaatcatatttaactcaacttttttatgcattttgccagctaaatcacgaacgacccgcggaaaacgactaaaaacatattccatcggcatcatacggatagacatcactgactcttgcagatcacgagagttacgctgtagctgtgcaatacaactgagtagatcactatgaatagatggctcaagcgtgtcactatgttgcgctaacatagactgagtgatcaccaattccccgaccaagttaatcagttggtccaccttttcaaccgcaacgcgaatactggttgattccgttttggcctgagcaacaacaggttttcgcgcaggggctggtgtcgcagttggtggcaaggttgtagcaactttagtcacttcatctgcttgactatttttattcaactcagcaacgtttttttctatcgtagctggctgctctgtttgagcagcaggctggatactttctgtcacagatgagggtgagtgttcggcttgctcttgcgttttatctgtagacgttaccttttcctcagtagcagcaacgttagcaaaggaaatctgttctggttcaatcacaaaacataataccgcactgatatcttcttgagttgctgtggtttttaataccgcttccaacccatggtgctgtttttcaacctgactaacttcacccagatgctttaattcatctagcattaaatcaatatcggtctcttttaaatcagataaaataatatggtgctgataaagaccgtcagtatttggtgtattagccgttgctagcggttgattttctttactaagctcatcgtcagtatgatgcactgcagaaacaggagtgatgttctccgttggggcattactttcagttaaagatactgagtcactcccctcacctaattgagttgattgttcctctttgacttctagagctaactgacgcaacttctcacaaatatagttaaatgtttcctcgtctggctcttgtgagtttttatgtgcatccaattgctgttgcataatatctttcgcttccagaaacaggttaataatgtcatcggtaagtaccatttcatggcgtcttgcactatcgagcaagttttccagcacatgagtggtctgctgaagtttaacgaagccaaatgttgcggctcctccttttatggagtgcgcactacgaaaaatagcatttaactgctcttgatctggattttgcggatcaagtaacagtaaatgctgttccatatcagctaacaactcatctgcttcatcaaaaaatgtttgataaaactcggtaatatccatcgttactcattcacctttacgcgattacatacaaactaaggagttgtttcctgttttgtcgtaatatttgtcgattgtgatggcaaactttccccagaaactcctgtttcaacattttccttttttgattcgggaagcttagatgtagaagaagacacagacgaattcgtctgtgtattttctccgttttcttgtggggtttcttgccctgaaagcagaggtttaatttctgatgcctcttttattgctggtgcaacccgctcattttcatgtacaattttcttttcttcctgcttagttaaaactaatatactgatccttctattcgccggagcaaaaccatcctcttttactaagtgaacagttgatgccatacctacaacccgtagtactttccattctgcaagccctgcaccaataagttctcgacgagatgcattagctcgatccgttgataactcccagttactgtatttgagtgcaccactcgcataaggaatatcatcggtatgacctgataaactgattttataaggcgagtcatttagtattggcgctatcgcagttaaaatatctttcatataaggttcaacagtggcactaccaactttaaacattggccggctttctttatctataatttggatacgtaagccttcgtccatcatgtcgattaataaatgaggttttaaatcttttaagcgaggatcttgtaaaataacttgctctaaattctctttcagtttacggaattgctgtttttcattgagctgtttatcttcgacaccttttggcagtacatcaccttcgttatacacaggatcacgtcctccccctggtatcgggtttgtcacgtctccactaacgcggcctttttcaatggcaacttttagaggtgtgcgaaaatattcagcaacacgagttaactcttgaggactagcgatagaaagtaaccacatcaccagaaagaaagccatcatggcagtcataaagtcagcgtaagctatcttccacgcaccatgttgtgcgttgtgctgttttttccctcgctttttaactctgattatctgtgaattacttttcataattactcttctttcattgcatcaggatttgcctgcatcggtgtccgtacctgacgtacatgttcttccaattcaataaatgaaggtctgtctgccagaaagagggtcttacgaccaaactcaaccgctatctgtggtgcatatccattcatgctagataacagggtggtcttgatgcactccatcattttcatttgttgactagagcgttgtctgatacgagaagctaatggtgaaacaaagccataagctaataaaatacctaagaaagtacctaccattgcgtgaccaataagtgcccccatttccccagcaggtctatcggcagcacctagcgcattaaccacccccataaccgcggccacaataccaaatgcgggtaatgaatcgcccatcgtagagagccccgccgcaggtacttcactttcttcttcaaaagtggcaatttcttcgtccattagtgcttcaatttcataaggattcatattccccgtcaccatcaaacgcatataatcagtaataaaactgagcatataaacgtctttcataatgcgaggatattgggaaaaaatgtcactttgttgtggattttcaatatctctctctaatgccaacatgccgttttggcgcgctttagacagcaaacgaaacattaatgccattagatccatatacatcgctttattgtagttagtgttacgaagtaatttcggtaggatttttaccgttgatacgatcgcacgaccattattacctacaacaaaagcaccgataccggcaccaaaaataattaaaaattcagcgggttgatataatgcgcctagatgtccacctacgagggtaaaccctccgaggacagcacaaatcaccacgatatatcctaagagtactaacacgcgatatccctttagctaatttcgttatagagagaatggcgaacataaccgcaaggagataggaggggaagaggaaacaactcaggttatagagtctttaatctataacctgatatttaactttcaatctcgaatcacattgcaaactgttcaagaccatccaacagttgtaagttaatatcggcaggattggcggaaagtttacgtttttttattgcccgagatggaggctgacaaagactacaaacataattacttgcaggctgatgtgcgtgtgtaataaatgaaccattacatttggtacatacagaaagttgtaacataccactttcaacaaaacgaactaatgtccatgctcgtgttagtgctaaaataggttcttgatctttaacgggtggacattgttctaaatataaacgataggcttttacaacagcttcaacacctacactccccccgctttttaataaaaagcggtaagcattataaaacattgaagaatggatattttgttcccatgtcataaaccaatctgttgaaaaaggtagcatacctttaggaggagggcttcctcttaattctttgtataatttaattaaacgccctcgacttaattgcgtttcgctttcaagcatttgtaagcgagcacctaaggtgattaattccattgctaggcgaatatctttcgcctctcggacgatacttttctcactcattgttatgcccgtttctttgtagcagaggtatcatgttccgatagttgacggaacaagttagaagaaagaaggataccagtatgaatttgttgcaaatcatccactctggattctttagtgagttgttctattgtttcgctgtcttcaaaccggaaattacagattagttggtttgtttcagccaacttaaccaattgaggcaatgttagctcttttagtgcatcagccatagaatcgctgatacccagtctaaacattgcggaagccttttcttggttaattaacctctgcgccaaaagcaaatacgataaatttatgtcataaatatgcttaagcaattcaaccgtactcatctctttacatcccgtccgattatattgaacaaagaggatcttgtttaaagtaagatcccgaggaaattaatataaatgtatattgaatttccaggccccattttatgaatatgactcgtagtaacactaccttgtattacttgattacgatcatttcaaaaagtagcgagaaaaacatttaaattaaaaaggattttaaatgctcgccaatatatcacgttaagaataatcctaacgagataactttactccttaatgattaagttattcaacggataaagtagtctaatttaaatactatgtgagttacatcacaaaaagataatcattattatggaattagttcattaactattcaagtaatattagtaataaaacttgctgagaattaataagcgaatctacccaaattaaaatattaatgataattttttattttatacgatctattaaacttataaacctaaaaatacagcataaaaaattgacaaatctaaaattgaagtttttttcgatcacagtaacatatattgccatagctcctcctcatctttgtctgaacaaagcacttgtgtttaataaatatttctatagatatagtttttttagtcatttaccgaaaacaccataaatgatcactttttatttacaattggcataaaaaacaaccaatcataattaatttgagttatctaattttataaattaattaaataaaaaaaattacacttaaaattcataaagataaagcataacactcttacattagcaggataagttatacaaaattaaattcctagttatgcatcttaccttataaattattgaatatttatttctatcacataaaagttttattaataaataattaaaaattactaatcaataactaaaagtgcaaaataataaagctatataactctttatgcgtgttttaccgaacaaagattaatcaatataaaaaaacatgacaatacaggtaagatttatttatggtttttacgtaacaatcaaattacttaccaactttttttagaaaaataaatataaatccataggagaaaaaacctcatttaaaaatataaagtagcaataataactttatttacccaattaaattcgataaaaaaaatatataatatttgacttaaacttaatataaacaaaaataatttattttttatatttcagccattacatttatataaaaaaataaaaacacatataaataaaaaaaacaggctattatttaaataacatagtatcaataagtaaaaaaaacagattgattttattaaaataataaataattaatttattataaataatcagtgtgatttttttatttcttatccgttattctgataaaaatagactacaaatgaaataactatttcattttcagcaaaaaagttttaccgatctcttctttcaaaatgattgagacatagaaaatttagaatggaaattccaacttactcatttgcaatttgatcaatccctatcctgctttaacgctcaccacctaaatattaacatttgtataaatcatttatccaatgtcaatattaacaactatttttgatcaaaataacctcttattgcctactcaatcatcatcattaataaactgtaaaatagcaaatgttactttttttatatatgacagataagatagcttaatttacgaccaaaaataatacgttttttatttttatttgtcttttttttaagcatgttttccgatggtttgagaagagtagccttagccatttcttagcgctaatcagctaatatcaatgcttaacaaaagagatgatgggttcttctaagaaaggtattgataaaaagactgcttttttaaacaaaaaagcaaacttatttttatcatttttatttattgtgatattgattatcatcaacattactcaaataaagagtagaattggtgggaaataactttttgacagacaacacacaataagcagattgatataacaaatttattcaaaatagttatttatcactattttttatcataaaaacaaataacctcagttacgcaactcattactcaacgatctcatttttatgtaacaaataagataaaaatattgttagccatctttctgtcaccatcaactataattatttacgtaacaacgcccaataacatgagcaatagtttagaagtcgattagccttttatcgaccatgttctttttgattctcgctaacctttagtattttcttttccccgtacttttacttaatctttttaatcatttttgtatcatgatataatacgaaaaataagcctctaattatttctaatagaaattacaatggtgcatttatttcgttattcgatgatttttttcttctataagtcagactcatcttcttgataaagatataaataatgtaatattgaaatagatattttatacaataaatagattagtatgttttttcaaccagtataataagattacttattggtagcatttcccctacagcttgtttacaaaaaagaatttatatcctaatgatatgtatcaacaatcaacacttccccccattcatcagctttactgtagccccctgctgtgtcatctacacaacttttctcctcccctgacttgctttaagtgcacttttatcaaaaatatttctcaaaaagcagtaggttaacgatcgtcaaataaagaataatgataaataattcatcgaatatattgaaattgtttgagaatatcatcgagtgatatgtacgacaccaaagttttcaatagaggcatgtaagtaaatgcatcttgtcttaagccctttagtaacgattttgtgtgctaggacaattaatagactcatcaaatgggtttttagtaggaaagccactccaccaaatcggcttaacataattttaaaatgcgttttttgatttaaaataagtttccattgataaatggttttttattatagataactttattctttcatctaaacaaagattgatgatacatgttatcgatcttattcagctataaacatagtttcacaatgaataattacacatatgaaataggttacctttaaccaccagtattaatacttagttaattttctattatttataatgctaaactgtattaaatagcgtttaaaataagctaaattccctcgttttcagttattgttttatattctacttttgttgatattatccccactattcttataaaacacattaacaagctctattgctgtggggataacctctatttatactcacaaagtattatattttatatccataaagtattaggcgggatgctcagaagcaattttccaattaattgcactgacacttttttctaaacttatcctgcaaacaatggcttctatctctttttgctcagctggggtagccaacacttcagcacaaacttctaattgactaggcattggtgtatctgcgctacttaatgattgcaatctcacatgtaaaccgtttatggcttgcaaaataagtgttcttaccaaaacttcatcgtgggtatcacaaacaatacgaatagaatagcgttgttcaatatctgtcgcttgatattgcggttgggcatttattcgttgagcagcttcccgtaatagaatattggcacaaagaataagcaatgtcgctacggtagcaagtggatagagtccaagtccacataacacaccaatgcccgcagagcaccaaagtgtcgccgcggtattaagacctcgaatattcattccttcgcgcataatcacccctgcgcctaaaaaaccaataccagaaaccacttgtgcagcaatccgtcctgggctatcgggtgaagtttcaatggagcttaagataaataccgcagcaccggtcgccactaaagcattggtgcgaagtcctgccattctttgacgccattgtctttcggcaccaatcaaagcaccaagacacattgcaacaaccaaatttaagatataaggagtcatagccattttaatttcctccataaacaatggctaaaaaaacacgccgttatacggctaatgaagtaatacaacaacggatctttggctacagcaatctaggaggaggaaataaggagaaaaaaacatagcacataaaatcacctcttagtaataagagcatctcaaggttagtgcgattctatgtaaaacgaggttcaagaagtgcactgcccaccggtaggtaagcagttttagcggagaaaacggcttaccaatttattttttgcattaatttactactttgcgtatccatctgttttctcttcgtcaaaatttggctggtagtataaataggccattgcacaatgtaaatgaacgcttcctaaaccaatcatttttgttgtactggtcgaacaaaagtgccttcaccaccttctttttcattaaaaaaccaaataccattcggatattcaggcagtgaaaccaagtacataatgccttcattaaattcttcaatcagtaaaatggttccttgacgatcttcacagccatccgtttttactacaacatgatcattaacgttcatttttactcctgataaaaattctcattatcttctttttattttacccataaagaaaaagcctgccaccagaaggtgacaggcttgaagaaaatttttaaaaggcttttattacagagctgttacgttagcagctgctggaccttttgcaccgttttcaattgtgaattctacgttctgaccttcagccagagttttgaaaccgttaccttgaatggcagaaaagtgaacgaatacgtctttgcttccgtctgctggagtaataaaaccaaagcctttagactcgttgaaccacttaacttgacctttcattttgtcagacatgtgactttcctatatatcaataaaacgttgccttctcggcatctactggcctgaactacctataacttatgggcacacatgaagaaaacggtcaaaaagcgatgctgtttaaaactcattaacttagaatgtcaatcataaatcaggtctgtatttaggccttactcattaacgcatgagacagggttaatagcaatagttttatgcattgaaagattaaaaaaatgcaaattgcacataaaaaatacaaattcgcctctatttttgtcactgtgtataaaatttatttgatattttatagcaattattaacagcaagtaggaatagtcttaagagactaacaataacagttaagcgtcgaatttaaaaaaactgttctatctgctgatcctgtctccatgataatctattcttaagaaacaaatttgcaacattcatcttttaaggtatttacaatgaatgtattaaaagacattttagagcgtgatttagcacgtattaatgccgcagaaaagcgtgatggcaaaccacactttaatagccaatttttaaaaaatcatatttggctttgcgtcagtatggtgttgtcatatttattactggccgctttgcttatttactctccttactttggggtcatttcgctgactcttttcactttgatgtttattgtgatggcaggaatactgctatttgatatcaaacctatttataagtttgatgatatcggcgttcttgaccttagagtttgctataacggcgaatggtatacttttgaaaaattatctgatgaagcgattaatgagatacgccagcacccggctatcccagcgcaaataaaagaagacatcaatgacattatacgcacaaaacaagagatacacttttatgacgtgtatttaatcgcattcgatcccatcaccaaaccgatttcgtcagaaaaattatcaccccaagtctaatactatgagaaattctccgtgttattgcacacaacacggagaaccttaaccattttttagccatattgtccataaaccaatcaaacagttaattaatctattttttaacgttgacaccctgatatatcatcgctattatgcgcctcgttctcaagagaacacaattcctccatagttcagtcggtagaacggcggactgttaatccgtatgtcactggttcgagtccagttggaggagccaaatttagaagagcccgctttatgcgggctttttgcttttctaaataaactagtccctactagcctttcatgctcatcagcgatatctatatataactatttattttttatacttttttatcaaaaaaacaacaaaacggtgcactcttgagcaaacaaacattttttttgtttttttgctttacaagggaaaagaggatagctattattcgcctcgttctcacgagaacacgcttcctccatagttcagtcggtagaacggcggactgttaatccgtatgtcactggttcgagtccagttggaggagccaaatttagaaaagcccgctttatgcgggctttttgcttttttaatgcccattatttcttttcttatttatcacttttattcattgtctaattttaagacactgctgcacaatgatctttaagtgactcttttcttactcatgatatggcagaatgtggctttttagggcggtaagaatatcaacacagtatatatactgtgccgaaatcggtataattttagataaaacacataaatcagttattttttaaccacttaagctattattttattttttttactttacaactgccctctctctcgctattattcacctcgttctcaagggaacacaattcctccatagttcagtcggtagaacggcggactgttaatccgtatgtcactggttcgagtccagttggaggagccaaatttagagaagcccgctttatgcgggctttttgctttttagccgatagcatcccacacttagtatgctgaaaaataaatttttctctgtttcaccctataaattccagcatctttttcattatcttgttcattattcgctgatgattgatgcaacttgctgtttatctatccatttaaacaaatatctacgattgacctttgacatctcaattttaccactatatgatacacgccacttaatgatgttcctccatagttcagtcggtagaacggcggactgttaatccgtatgtcactggttcgagtccagttggaggagccatttctattagtattaccctcgtaactatttgattttattctctgttttccctcacacacaataaaaaaataccattaaaaaggtagctatttaatcgttttcgtattactattcatttccggcttgactatccagtccaatccaatcgttgatctttcgattttcctaagacacacggagccggtatatgaccactgcacaacctatcaccctcactattcgccgtcctgatgattggcatgttcactttcgtgatgatgacatgctaaaaaccgttgttccttataccagtcgttattttggcagagctatcgtaatgccaaatcttgttcccccgatcaccaccattgaagccgcccgtcgttatcgtgatcgcataaaagcagctattccaagtggcgataaattcgaaccattaatgacctgctatttaacggatagcactctgccatcagaagttgaacaaggttttttacaaggcgtatttactgcttgtaaactttatcccgccaatgcgacgacaaattctagccatggtgtttccgatatcaataaaatctatcctattcttagtgtgatggaaaaaataggtatgccattgcttattcatggggaagttactgcatcagatatcgatatttttgatagagaagctcgttttattgataacgtgatggctcccgttcgcaaacaatttcctgccttaaaaattgtttttgaacatatcaccaccaaagaagcggcacagtatgtcttagagggaaatgaatttcttggtgcaactattacaccacaacacttaatgtttaaccgtaatcatatgcttgtcggtggtgtgaaaccgcatttgtactgtttacctatccttaagcgtaatgtacaccaagaggcattaagacaagccgttgcatcaggccattcgcgtttcttcttaggtactgactccgcacctcatttacaacatcgcaaagaatcatcttgtggatgcgctggcgtgtttaacgcccccaccgctttagcagcttatgctagcgtatttaaagagctcaatgccctttctcactttgaagccttctgttcactcaatggcccacgtttttatggtttaccggttaatgaaggcactattaccttaacggaaaaatccgttactgcacctgcagaaattatgagtggtgatgaagcattaatccccttcttagcaaatgaagatattcattgggatattagtatcaattaatcattagtgacttgatatcttctttttatgcaccatataaccccttatctgggatagttatggtgcatattttttgctattcctcattgcacttttccattttccatcaaaatttagcttttttattgcgccaaatttcgtatactggaaagtaaccacttagtgggggcttctctcttagtcaaaaccggttgtatgattaggaggtattatgagtagaaaaaatgaagttattcaaacacatcctgttgtaggctgggatattagcactgtagatatctatgatgcgatgatgctacgtttacattatcttcctgaaaacgaacaccatccagacaatgcagtggttgataaaacactttggcttactactgatgtagcaaaacagttgatttatattcttcaagcaggtattgataaaattgaatcatctgaagattttgtatcagacaacaccaagcattgataaaaagataagttcgagaaaagcattaagacaccaagcaggagtactttcgtactcctgtctcgtttttattgttataatcacctttcatttttatttcgtttatctctattatctatccctaacatgttaatttttcatactgttttttttaattagttattgttataaattaatttatatttaattaagttattataattttctttttattcgatatatctttcacaaaatgatatataacccgaattgacataaaactatgttatctttattttaataacttgaaaatagatatcacaaggaagttattagtgaaaatattaattattgatgagtgttactttactcgtaatggtattcggcatttcttcttaaaaaaaaatgtaaggcatgaaattattgatatgtcttctattgaagaagctaatcattatattaataactctatgcctgatattatttttattgatctcactaaatattgtcgtgaagtagcacattgtcagcacttgcaatatttcttttcactgactcaagagtgtcgtttatacctctatattgatgccaactatccagacaaagatagacctatcgccttgacaaataactgttttatccttgctaaacgagtactaccttgggtattagagagaacatcaacattaacttctcgttgccaagtttttttccccacttataaacattctctttgctcaatatttagcatacaagaacaaaaaatcataaattactggatgggagagttgcctaactatcaaattgccaaaaaattaaaaattagcaatagcaccgtttattcgcataaaagacatattactgaaaaaataaatgtaaaaaatagaattgaactcttctttatatataatatattaaaatatatctatgagaaataaatacaaacttatcgtttaatgattgatatattttatggaatgaaattatgaagctaatagtttaattaattgaggaaataacaaactcctattacttaacattgaactctataataggattataaatatgggtgaacatatcaaaaattaaaaatatttaatcacctaagagcaacgttttataacataaaatatcttcttcatattcaatatgacactaaacatattaataagcacaatatgtcatagcatgactcacttcactcttacagcactcctagagtgaagtgagcaccaatagagtcatcaacaacaaaaagacactattgctacatactattaggcgatacgctcaatctttgccggtaatccttgacgtacagaggcaccagaaacccaatctaaccaagtattcgttatttctcgtgttggatcagcaaagcctaagtcgtttaagttaataccactacctattgctttatccatagctaatggttgcccatctaaatagtgttgacgtgagcctagctctttatgtccataaccatgttcaatcgctaacactccaggcataaccccctctaataaactaatttcagcctcaacctctccacctggggtcactatgcgcactttatcaccatgcttgatcccccattttttaccctctagcggattaatcgcgactaaattgcttggttttaccattcttaaacgttggatcatgcccgttgagctacttaccacatgagatttaaaggacatcagttttaatggccattgctcttgtggaaaatgttgatgtatatcgctaccgtcagataaacgcggtggataataagttgggcaaccactatatcgctcaccggtaatagcatgatgattcttcgctacattttcattccagatctgtaatggtttcttccattgcgggcctgtcgcatcaccattccatgctttatcataaggggcaaagcgcccaccacgagtataaatattcgccacccttaggacttcttcttcttttaaagtggcagtaatagcaggaagaatacgatcgacaccacttaataaaatatcttcatggctggcaggtgctacaggctgttcgcccataaaggcaatattagccgctacacgcagataataatcttcagcactattaattgcgtggaaatgcccatctttatcttctagcgcattttcaccaaagccgggtaagtctaatgctttagcaaccgcaatgcagaaagtttccattgatataggttgaccatcggctgttttcgccacacgaggctctacaatcggccaacgtgccgtactggctttgacttgtacaccagaccacggcgcactaaatccccaactttcaaagttatgcgtatcaggcacaatatagtccgccagtgcagtggtctcattcataaaagcatcgataccaataatcaatggtagatgctgtggatctttaagacgcgcttccataacttggcgaatacctgcaataccgtatagcgggttcgtcatattggttatccatgcttttaatgaataaggataacccgctaatgccgatcccagttgctctgttaattgccctgcggcaaacggataccacggtgctttagcaggataaggagactccccttttgcgatccgttcacggtattcatcagattgttcataggccgctttactgcgcgatagcaccattcctttaggcttaattttgcctttaaaactatccatattgtaacgagggccatctatcgcaccattaaatttacctccaccgacagataccccccctttcaggtttagatttccaattaaagcgtttagcatgatgacactccacgccgtatagaaaccatttccccccatcatgccaccatgtgagataaccgcagcttttcgtccgtagtcagtaaattcacgcgctaaggcaataatagtgctttcaggtactttacaacgttcactatactccgccaatgacatgcgacttgcagcttcagttaataattggaaacttgattttactgtaacctcaatacctgtttttaatgtcactttttgagtaacaaaaagctgtgctctgtctacttgcgtcgctgctgtaagctgtccattaagggctataaccatattttgcgcttcgccatcggcaatatcctcaagatgcgcggcggttaacatctgccctgacagtggatgattttcatcactaatgactaaatgtgtcgcattagtccagcttcgctctccaacattattcatcgacacttcactgggcaccgataaatactcagcattatagcgtttgttttcaatgatccagcggatcatacccatcactaaagcagcatctgttcccggttgtacgggtacccaatggccatgatcattagctaacgtggtggttaatggcaaagcaggtgccacaactacatagttaaacgaaccacgaatacgcgcattcgctaattggcgaccttgacgtttaaatggatttcctgattgcgcaggtgaggtacctaaaaatagtgcaaattcaacatgatcccaatcaggcttcacatgagcgtttttatccagatcattcattaatgcaccggagccggcacgatacgctaatccacaataagagccatgagcaccaaaatttttactaccaaaggcattttgtgcaaagcgacgaataaagctatctcggccatcatccccagcattagtaactaataactgatttgctttaggtcctagggctggctgtttaggatcaatgggtgttgctaaatcgcggatagcacgtaagccatcaacatgcccttcaccaaataaatcgcccccctcaaccacttctttgatcagttgctcaaagctaattcgttgccattttccctcacctcgtttacccactcgtttcatgggttcaagaatacgagtaggactatcgaggctttccatcattgtcgcaccacgagcacaagccgtagagcggttagctaaaccactttcgccccccattttttcaaaggcttcttttattggcatgttataaccaaaatggatatcctgagataatgggtgataaggatttcctgcaatacgtaatacttgattattgttacgatcgactctcgcacgcacaccgcactgagtccaacaaccaaagcattgagtcatacaaactgcttgattggtattaggttgccaattcgctttcgccgtgattttaccttctggtaataaagagttaccgttgatcctatccaaagtaaccttaccagaagtcccatcaacgagaccgtcgacagcacgcttagcaacatcgcgataactggcagcaaatgcggcaataccaccgataaccaatccacctttaagccattgacgtcttgtaaacttagccatgctgtactctcctgacaacccaacgaatactttctctgaatataatggttaacgctatccaaagcccaaatgttccaacaatcgctaataatccatcattacccagcgggaactgataaggattggtaataatgttatatttgggaatatattggcttcccattaacattagccaacgtaatacccacgccaatcccattgaaataaaagccattacggtaataaatgccactgagcgtgcctgttttgccattaatccgcccatagcaacagacactatccataaggcaataacccctatcgcactccaccagcctaaacttcctattgccaattgttgcctaatggcttgtcctgaaatagtatcccccgcaatccaaaaacctgtacatacagcaagtaacattaaagatccgataaaccacatagccagttcacgctgatacacaggctctcgtcgcgtacctaatgctaatagcgtaggcaatacttgcatggcactaaaaaacagtaatatcggcagccagtaggtataaagcaccggtcttgcttttaaaatagaagcttcacggccggtatagagcaataaacctatcgaggttagtgcgcaggctaaagcaacccaacgcgttaacttatattcacgtttccacactaaacgcacgaccacggcaataaagtacaaaatactaaatgcagagaagagtggcagtaatagtgatccccatgccatccacgaccaaggagttggataagcataaaaatgccaaacacgtgcggtttgatggagatcagcggttaatgctaaaggggcggtgatccccgccgtaacggcaataaaaaccgcaacagcttctaaacgaggattacctgtacgccctttccaacattgccagcatgcataaagtgttgcgcaacacgcaatgccgataaaaaagaaatattgaactgcccaaggtaaccaaaagtattcttgggggatcgctatcacttcttgaatttgcgaaacggatgaaatcatgagtgaacctcctgccataatgcgggttgcccttgtccaactaatggctgcacaaatgcatcatctaaaccaagataaaaaacttgtggcaaggtgccactttctggtttaagtacttttaattcatgttcatgctcgcggatcattttacttattgtgctgtgtggatctttcatatcaccgataatacgagcgccccccacacaagattcaacacaggcaggtaataacccaacttctaggcgatgagcacaaaaagtacatttatcggctgtctgagtggaatggttgataaaacgggcatcataaggacatgcttgcacacaataagcacagcctacacaacgttcattatcaatcacgacgatcccgtctttgcgttgaaatgttgcttgaacaggacaaacaggtacacacggaggctcgtcacaatggttacataatctagggagtaagacgttcgttattccctcttgccccttgatagcaacttgatattggtttactgtcgtcctaaattgtccttgtggcgtttggttttcaatcgtacagctcactgtacaagattgacacccaacacaacgacgcagatcgatcagcatgccataacgtttatcctctgagccttcacggcgctctggggatagtttaatgcctgcttgagagagaggaaccagtgaagcacctgcggtaaggacccctaattgttgtaagaattttcgtttaccaagatccatatttgtctccagtatcactcagtaaatacctgccacattgagcgaagggaatagaaaataagtatttatggcattgtaaaaattactgagtcctccacctattgtggtttaccacatactcggtgcgaacttgatccaaaacaatatttaacattagatagttatgacgataaaacagacaattgggataaaaaaaatcgctagtttgagcttattactgctcttttttctgctctcttcttctgcggttgccaaagagtggactattggtgtgttagcgttgcgaggcgacgcctcaacccaaagacattggcaaccgcttatcgataccttagatcaacaaatacccacagatagctttctgctgttaccacttaacttgtcagaaatgaagcaagcagtggcggacaagagagtagattttctattgacgaatccagcgcaatttgtccagcttgatagtgcatatccgctacgttggttactctctttacgctcgggttatgagccggataacacaacaagaaatgtgattggtagccttattttggtgcgcaaagacagcgcaattacatcgattcatgaattagtcggaaagcgtgttggcgccattgcaccagatgcctttggtggatatctgttaggttacaaagcactgcgtgaagaagggattgatcctgagcaggattttacattacgttttagtggttttccggctgatgcgttactttacttattacgtgatggcgatattaatgcagcgatcatcccagtttgcttattagaaaatatggataacgaaggtcttattaataaagaagattatcgtccattattaaattattctaccaatacttcttgtttaaccagtactccgctctatcctaattggtcatttgctgcattagatactgttcctgacacattagtggataaagtgacacgaacattactcaatgatgaaagcgacaccatgaaatggggggcacccgcttctcattctcaagtggaaaatttactccgagaagtcaaccaacacccaaggcagcgacaactttggcaagatgcgaaaatttgggctatccagcaccgttttattatcggattatcattgggtgccattatcttactggttttcaaccaaatctggattagttatttggtcagaagacgtagccatcaattagaacaagcgcatatccatttaagagagcaaaaagaggcattagaacaagctcagcgtttaaatattttaggtgaaatggcgtcaggctttgctcatgagcttaatcaacctctttctgcgatcaaaagttatgcccaaggtagtgcgatccgcctagaaaaagagaacaaaaatcatccattactccccgcgttacgacagatagaccaccaagcccaacgtggcgcagatattattcgcaatctacgtttatgggtaggtaagcaatcagcaaatagtgatacagtgccactgtcagaacaaaatgttgcccaatgtattgaacatatttggcggttattacgtattgatgaaaaatatccacaagtgactctgatcactaagattgataaacatgataccctatacttacctgaaacattattagagcaaatattatctaatttgatcaccaatagcctacaggcgggtactaaagtgctacagataagcacccataaagcgcctgataggttgttaattgtgatcaaagatgatgcgggaggaatgagccatagccagcttgaacaacctttctccccttttcaaaccaccaaaacagaaggtcttggtttaggtttggtgatttgccaacgcttattaaattcacaaggtgctgatattcacatagaaaatcaaaaagataagcaaaataatgttggattaaaaatcacccttattttccccaataacaataattagaggaagaaaaatgccaacaattcatctggttgatgacgatctcgccgtcaccgatgcttgccaatttctattagaaagcttaggttatgcggcgcaggtttggaatgacagcgaatattttctccataatattgacctttatcagcaaggggttgtgctgttagacatgagaatgcctaaagcagatggtagacaagtacatcaatatttaattgaaaaacacagtacgctagcagtgattttcttaacgggtcatggtgatattccgatggcggttgaagaaataaaaaaaggtgccattgattttttacaaaaacccattgatagcaatgcattactctctgcactgaaatccgcctttaccgaaactgcaacacgctttacggctgatgatatccgtcgccgttatgcctcactgacaccaagagaaaaagatattgcatattatgttattcaaggcctaatgaatcgagaaattgctgaaactgcctgtgtttctatcagaacagttgaggtacatcgagcaaaagtgatggataaaatggccgttaaaaatatcgcagaattagttaccgcattacaaggaattgatattgtagcgccaaatttatgacaaaatttctgatctgcggtaaaaagtgtcacaatatagaatattcattggaaaaatagtaaatagataggcttatgataaagtcacctccatttaaaacatcatttttacagcccaaatattggctgacatggttggggataggattactctatcttctcgttctgctcccttatcccgttatctactggttgggtacacggctaggtcgtttatctaaagtctttttaaaaaaacgtgtacaaatagcagaacgtaatcttgagctatgttttcctgacatgcctaaaaatgaacgtgaagcgttagtgaataaaaacttcgaatccgtaggtatggggctatttgaaacaggaatggcttggttttggcctgattggcgtgtgaaacgttggtttaaaatcagtggtagagaaaatattcaaaaagtacaagaaactggccaaggtattattgtcgttggtatacactttttaactctagagttaggtgcacgtatatttggcatgctaaaccccggtattggtgtgtatcgccctaatgacaatccagttatggactggttacaaacttggggtcgtttgcgttctaacaaatttatgttagatagaaaagatgtcaaaggtatgatccgcaatttaaaagcaggagagatcctctggtatgcccctgaccacgattacggcccacgaaagagtgtctttgccccactttttgccgtagataaagcagcgacaacaacaggaacctatattctagtcaaaaccagtcatccggctctgatcccgtttacaccaaagcgcttacctgaagcaaaaggttatgaactgattatttcacctgccgtagctgattttcccatcgatagtgaagaaaacaccgctatcgcaatgaataaagtggtcgaacaagaaattttacgtgctcctgatcaatatatgtggttacaccgtcgttttaaaacccgcccacctggagaagcttctttatataatgagataaagaaagtacactagtccccatcagtgactgttttaataaaaaaacagtcactgacaaacagattgactctcttaaccaagattaaaatacaagactaaaataataaaattagccatactcactactattatttcctgcaaataaacacattataaagcactacctatcgttgttattttgtattatggcgatattcttatttaagaatagataaccaacattgagataaaaaaaacaacgcaaacaccattattctcactttatgtgcttcgtttacattcttagataaaggagtgacatgaacctaaagccccgcaacaattcttggaaacaaaatctctacattgtctggtttggttgttttttaacgggtgccggctttagcttgattatgccttttctaccattgtatgtagaagagcttggcattaaagatcatgagtccttaaacctatggactggtgtcgcttttagtattacttttctcttttctgccatagcggcacctttttggggaaaattgtcagatagaaaaggacgcaaattaatgctattacgttctgccttaggtatggcgatcgtcatggtactcattggttttgctcaaaatatttggcaactattaattttacgcgctttattaggggtattagggggttttgtgcctaatgctaatgctcttatcgccacacaagtgcccgttaaaaaaagtggttgggcattaggaactctttctacgggtgcagtaagtggcgcattaattgggccattaattggtggaatacttgccgatctctacggtttacgtccggttttctttattacagccgcggttttatttatctgttttatagtgaccctattttttgttagcgaaaattttacccctgtttctaaaaaagatgcattatccacccagcaagttttttcatcactcaaaaataaaagattagtcatttgcctgtttttcaccaccatgattatccaagtggcaacaggctctgttacgcctattttaacactttatatccgtgatctagccggctctatcagtaatcttgcctttattagtggtgtgattgcatctgttcccggtattgccgctttaattagtgcccctcgttttggcaaattaggtgatcgcataggccctgataaggtgcttattttcacattgggtttatctatttttatgcttattccgatggcactcgtcagtaattattgggaactaggcgcattacgttttttattgggtgcggtaaacgctgccatgttacctgcggtacaaacgcttattttatacaatattacgcctgcaattgctggtcgaattttcagctataatcaagccttacgagatgtaggaaatgttactggaccgttaatgggcgcgtttgttgcggccaattatggatttagagctgttttttatttcaccgctgcggtggtattttttaatcttatttactcatggataagctttcgtaccccgcaaagaaaatagtcaaaaaatccaccaatagatttagttaatagttttttttcaataaaaaattacactttctctcttaaaggtctaattgttaatttttttattttatttttcataatttattgtttaataagaaaaatatttacacaccatgtttacacctctttactttttcttgtccttttttttcaaaaaattgcaaggttaactattgcaaaatgagatttttatcgacttttgcactaaaaaatggtttataaagtattaaatatgcttttagtcactgaagttcactaaaagtgtgttaaaaatatattaattaaatgtagtggcaattgataacagaatgaaataattctgtattgcctcctactgatattttgttctttttacttgcaaacgacctgcaaaggttttttttgggaatttaagatgcaatctactcactcaaaatcaagccgaaccttttttggccatccataccctttaagctctctgttcttcacagaaatgtgggagagattttctttctacggtattcgcccattattaatcctatttatggctgcaaccgtttatgaaggtggtatggatattcctcgagagcaggcatctgctattgtgggaatttttgctggtggtgtttatttaacatcattgccaggaggttggctggctgataattggttgggacaacgtcttgcggtttggtatggctctatctttattgcattagggcacctttctatcgcactttcagcgttttggtctcagaacctattttttatcggcttattgcttatcgtattaggtacaggcctatttaaaacctgtgtcactgttatggtgggaaccctgtataaaaaagatgatacacgccgcgatggtggtttctccttgttttatatggggatcaatatgggctcatttatcgcaccactgatcaccggcttcttagtccgtgattatggctggcattggggctttggtattggtggtattggtatgctagttgcactactgatcttccgcttttatgccgtaccgacaatgcgtcgctttgataaagaagttggcttagattcaagttgggatcgccctactgttgtgcgtcgtaatgtcggacaatgggtattagcacttgctgtgatattaattgccattgttggtttaattatttcaggcactattccatttaatccggttattgttgccaattttatggtttatgtgatctccggcagtgttatcgcctattttatctatttattcctatttgcaggattaagtagtagtgaccgttctcgcctgtttgtttgcttcctattattagtttcagcggcactgttctggtctgcattcgaacaaaaaccaacctcatttaacttatttgctaacgactatactgatctaaattttatgggctttgagatccctgcggtttggttccagtcagtcaatgcgctatttattattattcttgcccctgtatttagctggttatggccaatgctagcacgcaacaatatgaatttaagtagcatgagcaaatttgtgattggtattttattcgctgcaggtggctttaccgtcatgatgtacgcctctgaaagcgtgcttgcaacaggcagtggtgtttcaccattatggttaatttccagtattttattgctgaccctaggtgaattatgtttaagccctataggacttgcgacgatgaccattttagcgccagcaagaatgcgtggacaggttatgggcttatggttctgtgcgagtgcattaggtaacttagccgcaggtttaatgggtggaaatattcgtcctgataaacttgatgttatgcctgatttcttctctcacgtctctatagcattggttatttgtgccgttgttcttgcagcattaattattcctgtgcgtaaactgttacaaagtgcagatgataaagagaatgcgcaagcataatgagttttaggtaacatttttcaccctataactcaactacgctcctcaaattagacacttctactctaatttggggagtttttttataaaattgaaatatacacatacaccacaaatattagaaataaagaaaatagatctcacagctctatgtcctgaaagtgacaataaaaaatgatatcatagaagcgaaatttacgagataatgcttcaatagaaaattttcgttctgcttaaaatggagtcttttaattaaataaattaaaatatttaacttttaaagactattcaataagataggacaagccatatgctaaacacaaaagaaaaaaacatattgagaaatatagaaaaaagtgttttatgtaggaatataaaatttaatataaagtgtaatttacaaaccactttctttacaatagttttctctcttttctttatttttagtaaaagtataactcttacactacaaagtaaaatatcaattagcttattaatcgttctatttgtatatttatttggatcatggcattcattccgaaatataaagctagcaacaaaattgacaattatatatataaaaataaaattaaaaaaactcgttaataatcttagctcttcatgaaaattaaattaaccctgtacagataaaactttcctcatcgagttgaactaacgtttactaagagtttgctacctcctacttcttatttttacttccagccactttttatcactgttttgctctgctaaattgtttcttcttcctctttccgattaaggtactttatgaacacgcttcccatttattatgttaacgcttttacttcaacacctttttccggaaatccggctgcggttattttgttagataaatggctacccgatgacacactacttaaattagctaatgagattggtttacctgaaacggcttttttagttgccaatcatattcgctggtttacgcctaaagtagaagttcccctatgtggacatgcgactttagccacggcttttgtattaaaaacgattaacaaagcacctgcgacaagctttaaattccattctctgtctggagagctcacggtatcttgtcactcttcaagttttactctcgattttcctcaagtacctgcatcattaaatccaactataaaaccatcattagaagcggcactaaacatagatattgaagaagtttggcaatctcacgacagatatacctgctttgtggctgatcctaacaaggttattgattatcaacctgactttaatgctataacacaactaccacttcccggtgtaatattgaccgcgaaaggtcatgcgccttttgattttatttcacgcttttttgcaccacgtaaaggggttaatgaagatccggtaactggcacttcacattgtgtattagctccaatttgggcaaaaaaattaaacaaagataaattaaatgccagacaagtttccgcgaggggaggcaatatacagtgtgaactcaaacaagagcgcttattgcttactggtgatgctgtactatttttaaccggtgaaataaccttttaaaattaaagaggaatatcatctattcctctcctttgctttcatttttctctattttatactttaggatcatccctactgtatagaaagataaggttttattatgtccacaacggatttatctctagagttgcaagataaaattaaacactcaatcacccgcgtctctaaagttatttttccaaccacgaccaatcatcactccacactctttggcggaacggcattagcatggatggatgaagtctcttttattaccgctacgcgcttttgccgtaaacgtttagtgacagtttctacagagaaaattaattttaatcaccctattccctctggcactattattgaattagttggtgaggtaatacgtgtcgggcgtaccagtctaacggtaaatgtttctatttttctcgaagagatgtatgccgaagggcgagaagaagtgatccatggccaatttaattttgttgccgttgatgagcatggtaagccaacccctttattcgataaaccatcgcttttataaccgctaatctgtcgttttattcttcaaattaaaaacgacagattttattatgctgtgggttaattaatatcgtccgattttatttgatcagataaatctttgtggatacttttcaatcacatgaaaatatcaaataaaatcaatgggtaaattgattactcacatgtaaagcaagagttatccacagttaatgtggataacaagaaagacgttgcaacaactttagccgttaaataacacaaatttttatcacttcaaattcaatttggcatacagtcaactttgcccccgtgattgcactttcagccatcactatctctgttgatgattgataacgccgacacacctctagagctaattcaatactgggctcaattaataaaatagcgccgatattttcaaccgtcgtcggaaaatcactctctgaggagatggtatagagtaaagattgctgatcttgggcaatttgttgcgctttatctgttgcggcttgattaactctttgttgtttagcggagtcaccgccaccagaatgcagatagatcatcgcttcctcataaaaatatcaataataattaatttttgctatgtaaacaccccatcaatatctgtcgatataaaggccgtttatatgtaattagataagacaatggtagtcaacaaaaagcctttaataacaatattattaaaggctttagttctatttcatatcttggttatattgcgtatgagcagttaacagcttatcaattgaagcttggcataaataaggttttaatgcggcaaactttttctctgaccaactataaatatttaaagataaaagttgctctatcacttttggttcaaagcggtatttaacatgcttagccggtattccaccaacgatactataaggagcaacatcttttgtcactacactatttgctgcgataatagccccttcaccaatagtaacgccaggcataatcattgcccgcatacctatccatacaccatcgtgaatataagtatcacctttaccaatataggcttctttaatattgtctaaaaatggataaagagaaaaccaatccatacgatgagtatgattgccccccatcaaaataaccgcttcagcaccaatacaaacatagtcaccgatatataatttatcgatttcccataaaggttcccactgaaggctaaattcatcgccataaaggtaacgcactacagatgcttcaaagccattatcccaacaatcactgtaatagctatgctgacctttaataataatattcttattttttactgtttcgtgtaaatattcgacacgtgaccaatgtttcgtgttcatactatgactcgctataaattaatgagccatcaaagaatgctgtattctttgatgatgtgtccgcattccaaaacacatcatgactaagcaatccgtggttgtaacaataacggattttgaaccttatccattccttacactccttcaccattattatgaatatctataataatgtgacatagaaaaaccacaaagttgcaacttgttaactatttttccagcaactctgtggttttaaaaatacattatcttctagctatcaactatgctatttaaaaaaatctttactaccatgtggcgcacaacgcaaatattgcggagcgactttaatggtctgctttaatttttcagccgcatgccaaggccaacgaggatcataaagtattcctctgcctaatgcgataaaatcagcttgttcagtcagtaaaatagcttctgcttgctctggctctgtaattaacccaaccgcaatcacgggtaattgtgtttcattatagatggcttgagcaaaaggaacctgataattaggtcctagcttgatggcttgtttgtctgataagccaccggaagaaacatgaatatagtggcaaccgagatcttcaagatgttgagttaatgcgatagaactttccagatcccatcctccctcaacccaatcagtcgccgatattcttactcccacacacattttgtcagagactgcttttttgactgcagtaaaaacatcaattaacaagcggctacgattattaaaatcaccgccatactgatcggtgcgatggtttgataatggtgataagaattcatgcagtaaataaccatgagcaccatgtatctcaataacatcaatacctgctgactcagctcttttagctgcttcaacaaatgcgttttttatcttttcaatctcatcaattgttaatgcttgaggctgatgatattgaccaaaagcaatactagaaggtgctactttttgccagccattctcatcatcaggagccaatgattttccaccttcccatggcaaggatgttgatgcttttcgccccgcatgagccaactgtatacctattttagcattagtatgctgttttatatcgctaataagctgttttaatgcgcgaccatgttcctcagaccataatccgagatctttataactaattctacctcgaggctctaccgccgtcgcttctataatcactaaagcggcacctgataatgctaattgcccatagtgcattgtatgccaagatgtgggtattccatcttgcgcagaatattggcacattggtgcaacaataatacggttgtctaattgatgaggtcctaatttattaggcgtaaataacaaactcatgcaaagcctcctgctatataagcaatgagacaaaaatcatttttatcttatggttacgattaaaaataattatttgccctctatctagttttaaataaaccatcactataacttaataaggctaacgcattaaatgacataacgcgataacctatctcacagtgtgctaagaaaaacagacttcaatggctgatcctaatacaacatctaataaaatagcggtattagatgccatattaggttataacgcattataggatatgaaatattaatgtggttttactaataagagtgatagctttcttgcaaagggtaaaacgaataaaacggttggaaacgcaatcatccaagataccccccatgaagagaaccaaggtgcaaacataaggctatttaagcccattgtttttgctgtactaataaaagaaacaatgccacacatcacaaaagataggaaaaacggaaccagaaaaatcatggctcttggtggcaatttaggtatacccaaaatattatttttatcttgaaaaaacatagaaaagaccccaatagaaacgtgtactacggcatataaccgccaatacaacaggcgaatacccataaaggtaaaaaaattaagttatatgcgttgattaacgtaaacgcttacgagtcttgtagactagaccgatgctagtatataaatgaaagtatttttgtcaagtaaactattatcattatcatttgataaaaacaatagaactcatgaataacttaagtgaatctttatctttcaacagaactacaccaagggtaaaacattattactcatattttgagttaattttttacccaatacattttatcggtgaaatgctccctgaggaggggagcatttctgacacagaacgatttaattaatattaaaagtgatcatctaattgcatattaattccttttaataacagtgtttattccaattaaattgcataattttatttagaatattgaaatgtatagggtaaataaattaattaactctgatacaacacacttatcttactatattgttttttatctaatagtaagaaaagatcgcctcttatctcatattcaatatgataaaattatattttcgatattatccattttcatacaacatatttattatctgcttatttataattaatgcctttattttctattattaatagaattaatattatcaatttacgttaatgcattactttctatgagttaactctttggttatattgaaatttaaaacaatacagttcatcaataaatgtcatcatcatcataaaagcaagtatttatttatcacctctacaaaagatttatgtagaaagtgattattttattaattaaacaccttactttcagtaaaaatacatatttaataatatattatctaatattaagagttgattaatcacacttagctttatcttttattatattgctcaaactttatttgccttttatactttcttaaagcatattttgataggtgttattatgaatattttattagttgaagacgatctgcaattgggaaaggcgctctgtcgtggtttagaaattgctggttttcagccctgctgggtaagattgcttgcggatgcacgtgttcaattaaaccaaaaagcctttgatttaatgttgcttgatctaggtcttcctgatggtgatggtcaagatgagcttatcgcactaagaaaaagtggtgaaaaaatacccattattattttgacggctcgtactcaaatagataacttagtacaaacattagattcaggtgccgacgatttcttaccaaaaccttttgctatgcctgaattaatttctcgtgtaaaagccgtaagtcgccgtatggccggtttctcttcacagatttggtctattggtgatttacagcttaatccctcgaatcatcaagtcactttaaatggtgaactattgttattatcaggtaaagagtaccagttattatatgagctgatgcgcaatacagataatgtagtacgtaaatctgatttagaacaacgcttatttggcttagatgacaaaattgaaagtaactcacttgaagttcatatgcacaacttacgccgtaaaataggcaaagagcgtattattacggttcgcggtatcggttatctcttaaaaaaagaagtgaactaaatgaagatccgctctttctttatttatactatctttctacaaacgatatctatcgtgatgctatggggcgtttggttagcttggatagaatttgattatcttgctgactttgaaactatctacaataagcaacaagaaattattgctgaaggatttgccaatacactcgaaacggtttcctctcaacccgagacagtaaaacagatagctcaccatttacaaaacatgtatatcgataccatgcttaatggtgaagatgatgatttacactatttaccttggtttattgtcttaaataaagataatgatctgatttataccaatagaccggaactttctctgcctaaacgggtactatcgcttgcctctgaaaaaatctctgtggctggggagaaatggtatttatcttatagttggggaaaacaacataaaattaaagtttttattggtgaatccgtcgaagatagaggacatgtcattggtaaccctatttccggtacttttgtgcccttcctatttattttagcgacagtgatcttggctatcttaattactgcttattttagtttgcgccctttaagacaagccgcagagctgatttctaatcgaaaacctcgtaatttaacgccaattaatgtcggacaacaatttaaagagatccgccctatctttaaagagcttaaccaattaatggcaagaatagatgcggctaatattagagaaaaacaatttatggctgatgcggctcatgagctaagaaccccgattgccgcagtgattgcccaattacacattctctctttagtcgatgaaaagcaggagcgagaagaaattattgaagatatgaaacaatctctggatagagccgccgcactttcccaccagcttattgatttagcaagattagagtgtgacgatttccctataaaaatagaaccctttgatgtttataatattattggtaatgctattgctcagcgcgtgccttatgccttaacaaaaaatattgagctatctttaaatgaaggtatgtcacttaaaatagaaacagataaacaagcactgctgtctatttttaataacttattggataatgcaatcaaatattgccccaataatagtcaagtcgaagtgactattgaacataaagatacccatcatctcaatattattctgcgtgataatggaccaggaattgcacctgagtatattagctcactattttcccgtttttatcgtgttccgggatcacaagggacgggcagtggtttaggcttatctattgcacaaaatctcgctgaaaaaattcaagcaaccatttccattactgaagggctacacaataaaggtattggttttattattaccttaccgttaaaaattaaaccactagataacgagtaaatatattgtaggaggcctttgcctcctataattttagttaaaactattagttatgcttatccccacaaagtggctatccaacgtagcatcgcggtaataatagcagcacttaataccaccaaaataaaaggtttctttttccaggttaaaacgcccgcaacacccacaccaataatcttggcaatatcagcgagttggtcaccatcaaaaaaagtagatgtcattgcaaccgaaaataagatcacaattgccgaaagtgaaaacatttctttgacccgctcagacatccccgttttattatttaataagataccggagatgcgcatggcataagttcctacggctaaaatagcgatacctgcgataagtgaagttgttgagatcatatttttctcaccacaaataaaacgcctaacaaggataataaaactggtattcccgcagggagaaacagtgtcgttgctaaggcaatcacactaccaataatagcggcttttcgtgttaatttatttttcaatgccggtaaactcagtgccaaaataatcgctgggaacatcgcatctaaaccaagcatttttatatcaacaataaaagagcctaaataaacacctagcatagtacctaacggccacatcagtaaaatgcctaatccacaagcccaaaatgctaatctattttgctcagcagtcgattgagataacccaaaaaccacactttcatcatttaatacatgaaagcctaatagtgatttaatcccttttccgggtaactctttcaccgccatactaaaagggatgtgccttgcattgaccattaaaccagcgagtgccgcatagatggcgcttcctcccatcgcaaccactccgataaatagaaattcagaagcccctgctaaaacaaaaatcgataacgaaagaggtacccaaaaatcgaaaccttgagtatgagctaaagcaccataagatattccaacgatcccatccgctaatgaaacaagcagaatatctctaagtacgttattatctagacgactgttaatatgcataaaaaacgtattatttattgaacgatttgttcattatgttgaacgacatatttttttgcaagctgatttttgaaggaaactataatgtcatcaccttcggcacccattgaaattatttctcaatccattgctagagaaagaaaaaaagcaggtctttcacttgcagaaatcgcaaggcgagcagggatcgccaagtcaacgttatcccaattagaagcgggacaaggtaatccaagtatcgaaaccttatgggctatttgcgtcgcactcaatattccgttttcacaactgatttcctcacctaaaccagaagttaaagtgatccgcaaaggtgatggatttaaaattagtgcagaaaaggcctattaccatgcctttttattgtcatcttgccccaatggcgctaagcgcgatatttatacggttattgctcagccgggtaaagatagagtatcagatcctcatagtaaaaatgtcacagaacatattcttataattagcggtcgtgccattgtcggtactttagataatcaacaagagttatctcccggtgactatatttgttaccctggtgacgttactcatgtgctacgtgcattagagccagacactaccgctgtcatgatcattgaacatcacaattagtgacaatggtattatcgcactgatttttcggataacgtcaaaatcagtgcaataacaattcactatggtttaacaccagctttctcaagataaatttctcttaagcgttgtgataacgcccctaccttaccttgatttattttttcattatcaatggagatcaccggccaaattaaagtggtcgctgaactaataaaagcctctttggcttgtttcgcttcttcaagtgtaaataaacgctcaatgatggtgagtttttgttctttggctaactgaataatcgcttgtcgcgtgatccccggtaaaatatcttggcttaatggacgagtgataatttcatcttgctgattaacaataaagaaattacttgaactcccttcggtgatataaccctctttgataaaaatagcatcatcagcaccttgctgatgcgcatgatgttttgctaaacaagcagcaagtaatgccaccgttttaatatcacagcgttgccaacgaatatcttcaacacttacgacagaaatccctttgcttgcattaggatgatttaccaccgttgagtgttgaacaaatagcacgagtgtaggggcgactaatgaagacggaaaatcaaaaaaacgtgatgaatcggcgccacgagtaacttgtaaatagataagtccttcatgtagatggttcttatcaattaattgcctgtggatctcttttaattgctcttttgttagtgaaaaaggcattgataatgctttacaagagcgctgtaaacgttgaaaatgcccttcaaaatcaattaattgcccgttaataacggcagtaacttcgtaaacggcatcagcaaataagaaacctcgatcaaaaacagagatattagcttgttctttaggtacaaattggttatttaaatacacaatctcagacattttacctccgtgataaattgtattaaccttgataacttttcaccacactactctttcacattactatttcaaatgctactgactttctaatacaaatctttaatggcctttttctttaaagaattcctgttatatagctaaaaattgctataatttgcgataaggattacaaattaagaggttgttatgttagacattaataaaaataatttatctcagctaacagagaaactcgttaaaaagcagtgtactttaatgagtatcattgccgtgctgggattacttgcgggtattatctgtattattaaccctttttcttcaggggttgtggtcagcgttttcctcggtatcgttttttttgcttgtgcaataaccagcataatggcggcctttaatagccggatctcttctggttggtcgatgttaattactttacttgctggttttatctatctatttttaggctatatttttattaccgatccactaaacggcatgttaagtcttgcatttattatcggttatttatttatctttgccggaatactccgcttagtactcggctttaagcaaattaaagatagtttttatggctggtttaatattctagtgggctttttagatcttgttttagcctatttcttactagcttttggccctgaaacttctataacactggtgatggcattgattggtatacaacttattttaagttctattactattctatcaatagccagtgccatcaagcggatgactcgttaatgatgtcttacgtttaatttgttatttaaatttagagccacacaatgtggctctaaatcgtaagcaaaaaagttgtatattaagcacaaggtaagcgtagagaaacggtatacatattttcaccacataagtaacagttgccatttttctcaaataccatcacctgaatacctaattgtcccacttcgatatttggcaatgcatccgccaaaatactttctaatgcaggctctgatatttcaatcatacttatcggctcattgcttggtgtagtatcttgcaggaaatcacctaaacgaggatcatcggcataaatttctaatgtagaacgataaaccaatgtccgctcactgctattgactttagtatatccattaaagattataaccattttttggatatccaattttgcaacacggtttttaatttgtaagcataaagaaggcacaagccgaatattgacagaattaaaataacgatcgcaaatttgcggaatagtgacgctaatacaaggcttcggtgcaatatttttaatttgtttaccgcattccccagttaaggaattatccacaataatacgttcacggcgtgaaaaacaaatattgttaaaaatatccacagtgaagaaagagatataatgaacgccattcgttaaggcttgattctctaacctgaccgataccgctgatttatcagtacagggcaacattttaagttgatcattaaaatagaaccctacttgtgtactttcactaatatcacgacctaaaattaggttcgcatttacacagtaattttcactatgatagcttagaataccatttagcgttgcaggaaccttaggagacggcaacttctctgtcgtcatttcaacataatagtttcttgatttgagtgggttatctatatcttcactgttttctgattcagcataaaaaacagcaatctgctttggctcggtacctttaaatctaactttaaagtttgcaataccatatttattggtttttgaaatattgcttaactcaccttcggaattataaatttcaggctgagtaagtagtgtgctgttgtctttatcgtaaactaatgtgacctccttgttttgcatatcttcaccttcttgattttgaaggtgtaccacaaagcttttagatacctcttcccatttgctcggccattgcatagattcagagttgattgtcagtaaatcatcaaacctctcacaattagccgctgagcaatcggtattagggatcgcgggtgtcactcgaatttgcaacggcggggcataataggcattatcttcattatcttcatctcttagaatcaactgtaatgaagccactccactacgattgccagttaaagagatcttcgttttatggtcatcaacgatagtggtataaacatctttgttgttgggtaaaattaaaattcctttaggatttgtactccattgagccaaacgtaaatcactatcttttacctctacttcatagctaattatcccgttcatttttacttcgttaccaggctcatctggcgaagattttatttgattatatttaatctctgtaactgtatttttatcgggatctgtatcaggctcatcagcttgaggatgaacaggcttaggtggtgtttttgcggtatccttgcagttttcagctgttaagattttttgtaaacgttcttcttttgtttcgatagtcatcgcgtcatttcctttctttgctaagttccatgttcagcttaaagaaaaaaaatgcagtgaaaatcacaatagaaaaaagtcaactgagtattgctgatagggaaaaataaaaataattataaaacaaagagatagatataaattcaaacgtttttaagctatggttaccaacaaaaaatgctttcaatataaaaaataatttaaaatttaaaatatttttgtataaagctattgactgttatgaaaatgtgattagaatcagtatcagaaaatatttgtgacgagaatcacattttattaataggatacttaatatgaaatcaatgacttcttttattactcatctgcaccaagttgttgttaaattatcttcaactcgtttattgtaattctttgtattaaaaagaataactaagcataaagccagaaaatgcactctatatcgcaagaggcactatctggcttttattttctatctctttgattttttcttatcttactcttcgcgcatctttagtaacaaaaatttcacttgtttgaactaaaatccctcttcttgtaccctagtattaaatcaccttttatgatgaggatagtttatgcagcagcaactgcttacatggatacgtcagtttaatgaagagtacgctcaaatcacttctctgttacttgttttattgatcatttttgttgttgctcttgttctccactttattttgcacaaacttgtgctccctaagctttcaaaagctatcagtaaatacgatcaaaagtggcaactctcttttgaaattaataagttattcagtcgatttgcctttcttatccaaggtgtagtcattaatatccaagccttattatggatgggacccggtaagacacaggagatattaaccactacagctcaagcatggtgtttacttttcggtttattgatgattttctcaattatggatctctgtttgcagatcatgagaaattccccttcttttggccgattaccccttagaggtattttccaaagtttaaaattagtcgccagcgtgctgattggtatcatgattgtttcattactgatcggtaaatcaccgcttattttattaagtggtttaggtgccatgactgcggtgttgatgttggtatttaaagatccaattatgggacttgttgccggtattcaactctccgccaataatatgattagcttgggtgattggttagaaatgcctaaatatggtgctgatggtgccgtagtggatattagcctcaccacagtaaaagtacgtaattgggataataccgttacgaccattcctacttattctttaatttctgattcgtttaaaaactggcaagcgatgacacaatcaggtgggcgtcgaattaagcgcagtttatctcttgatatcaatagtatttactttttagatcaagagaatattgataaattagaaaaggcacagcttcttgaaccttatataaaaagcaaagtaggtgaaatctccagctataacgctagcctttgtcatgagcatcaaatgccacttaatcaacgtggtatgacgaatgtcggtacatttcgcgcttacgtggaagcttatctaaaaaatcatccgaagatccataaacagatgaccattatggtaagacagcttgccccaacctctgaagggttacctatcgaaatttatgcctttaccaatacaaccgtgtgggtagagtatgaagctattcagtccgatatttttgatcatatattcgctattcttcctcagtttggtttacgaatacaccaatcaccaacaggtagcgatgttagagcattaaaattccctaccaatatcgacacaccatagccctagcgttcattatttaaaagggagattaattctcccttttttctattaaataaattaacaaatatttataactaacgactttgttatcatattaacaatcttgttttaggctatttttttaaaatcgatatgttattttttatatatcgaatcactgtttccacctatatatttgatattttatttaccactaaagtggtattaaccgcaaaatgtaaccaattgtttaataattatttttttagataaccttattaacattttttatattgatataaatcattataggtataggtgtaataacttaacatagatatacaactttatttgttgtgaaaaatgttagggtaatgtcaatgtcaaaaattaaaaataatgtttctatcactgaaatgagccggcgtggcttcattcagtctgcagctgttctttctggcgctgctgctgtagctggaacggtatcattacctttctctgctaatgctcaaacaccccagggtattcgtcctgatgagacgtctgaaaccatcaaatacagtgcatgcttagtgaactgtggtagtcgttgcccattaaaagttcatgttaaagatggcgtgatccgccgtatttccaatgaaaccatgtttgatgactcaacctttggtcttcatcagatccgtccttgcttacgtggacgttccgttcgttggaaaacttataatccagaccgtttaaaataccccatgaaacgtgtcggtaaacgtggtgaaggtaaattcgagcgtatctcttgggatgaagcgacttcgattatcgctgataagctaaaatatactatcgatacctatggtaatgaggctatttattaccaatatggtactggatctaccggagcgaatttacatggtagaacagcctgtaaacgtctattaagtacagtcggtggcttcttaagtgactacggtacttactcttattcacaattaaccggcatcgtcccttatgtgtatggtgatatgctggaatctctgttaacagaaatcgaaaactcagatctggttgtgatgtttggtcataatcttgctgaaactcgtatgtctggcggtggtcagttctatgaaacactgaatgcgttagataagagtaaaagtaaagtaattattatcgacccgcgtcgtactgatagtgtcacaacattaggtgcagagtggatccctatctatccgggtactgatgctgcattagtggctgcgttaggttatgtgatgatccaagagggcatcactgatgaggcatttttacgtgaatattgcatcggttgggataaacaaactctgccagcctcagcacctgaaaatggctcttacaaagactatattctcggtaatggtcctgatgggattgctaaaacccctgaatgggcaagtcaattaaccggaatttccgttgcacgtattattcaattagcacgtgaaattggtaatgccagagctgcgtggatctcccaaggctggggtattcagcgtaccagtaatggtgaacaagcttgccgtgcaattatgatgttgccattaatgtctggtcatattggtcgtcctggtactaataccggatgttggggcggtagcattgaataccctgtcgcaagttttgccataccaaatccagtaaaaacccagatcccaacgtttatgtggtctgaagcagttgctcgtggtgaagagttaaccagtaaaaatgccggtgtcagaaataaagataagctggatacgggcattaaatttatgtggtgttactccagtaatgtgattggtaaccagcatgctgatctcaataaaacacatgaattactgcaagatgaatcaaaatgtgaatttattttagtgtgggataaccacatgacaccatcagcaaaatatgccgatattttactgcctgatgtcactactgtggaaactaacgatcttatcaataactcttatgctagtggtgcgtatcattatatggtgcgtttacaaaatgccattgagccgttatgggaaaatcgtcctaactatgatgtattggcagatatcgctgaaaaattaggtgttaaagagaaatttactgaaggtagaacctaccaagagtggattgagtattgctataaccaagtaaaagcaaataacccagcgcttccttcttttgctgaaactaacgatatggggattgtggatagaaaacttcctcctcgtagcgcttatgtggcattagaagcatttcgccaagatcctatcgccaacccactaaaaacagcatcaggtaaaattgaaatctattctgagaaattaatgcaagacactgaaggttggatcttaccagaaggtgatcgtattccagcaattccagaatattgtaaaaatgaagaaggtgttgaaaacgttaccttaaaagagaagttcccactgcaaatgacgggcttccacgataaaggtcatgtccactctacctattttaacgtcgcaatgttacgtgaagctattcctcatcaattttggttaaaccccgttgatgcggcacagcgtggattaaaatctggcgatattgctgagatttataacgaacgtggtcgcttgcatattcgagtcaaagtgacagatcgtgtattacctggtgtgattgcagtaccacaaggtgcatggcgttcacttgatacaacaggtgtagataccggtggatgtattaatacattaacaagctggcacccatcgccgtttgctaaaggaaatccacaacatactaaccttgttgaagtgaaacgtgcataaggagttaactcatgaaacaatatggtttttattttgactccactaaatgcactggctgtaaaacctgtcaagtcagttgcaaggacgaaaaagatttagatttaggccctaaattccgtcgtgtttatgaatatggcggtggtagctgggcaaaacaagacggtatctggacacaaaatatttatagttattatttatcaatttcttgtaaccactgctctaaccctacttgcgtggcaggttgccctactggcgcgatgcataaacgtgaagaagacggtttagtggttgttaatcaagatgtttgtgttggatgccgttattgtgaattacgctgcccttatggcgcaccacagtttgatgaaaagaaaaaattgatgtcaaaatgtgatggttgctatgagcgtgtcgcccaaggtatgaaaccggtctgtgttgaatcttgtccacaacgtgcactggattttgatgatattgaagtgatcagagcgaaacatggtacagagtgtggtatcgcaccaatgccagatccaagcttaactaacccaaatatcgtgataaaagcacataaagatgcaaaaccttctggtgataaaaccggctcagttcaaaatgcggcggaggtataaaccatgcatgaacttcctcttgtcttttttactgttttaggctctagcgcagcaggtctgtttctgatcgcttatatcagtaaaaagttaggtcaaattgatgaacaacaactgcgtaatgccaatattcttgctctgatattaatgcttgtgggcttaggtattggtggattacacgtaggtcagccactacgctttttcaatatgttattaggcgtaggccgttctccaatgagtaacgaagcttttctaagtggtgtatttactggttttgcttttgcaacagtggcactcactattatgaaaaaatggcggggattacgtgaaatttgtaatctatttaccgttatttttggtttagcttttgtttggtcaattccgcaagtttatcatattccaacaattgctaactggaatacagattacaccacattacagttttggatgacgctattaattggcggtggggtacttgcgatggtcagtggtgcaagacgtttaggggcattgtcctttattatcggtgccataattacctttgcagcacgctccggttatgtcagtttcctaagctttaatggcccagaattaagtgctgagcaatcactgttttggggtttccaattagcagtattagcattaggtattgtggttgtcgggtttagtgcattaaaagcgcaaacctcaaaactgaccttagccacttgtgccgcagcggtcgtaattgctgaattatccggtcgcattgccttttataacttatggcatataaccatgtaatattggttttctgtgctatgacgctctatcattattgatttatcatcataagcatagtcatcggcaagaaacgaaaaacaaaatgcatatctttttagatatgcattttttctttttagaatgaggagccgggttgttgtaaaaacgctaactcttctggtgtggaagtacgccctaaaatttcattacgatgaggataacgaccatatttatcgataatctctttatggcgtaattcatattgatacgtgtcgtcatcatttaattgtgaaaacaacgcaatggcatcttgatggattttttgtgattctgagtgcataaatggcatgatcagaaatttgcgttttactggtgtcagggtgagatattcgggtaatcgaatggcttcttgagcaagaattaacgccatattatcttgggcgaaagcctttggtgtatcacgccaaatattacgtgaaaactggtctagaataataatttcccctaaccgcccttcaatgctctcgcgccaagaggcaagctctgcgcgacttgcgctaatacatagctcaccaaatctatccttaatttctttatcaaaagcgctatccttttgaaaccactgttttggggtacattcttcaaaccaaaaggttaatacgggttggtaaggaaccatagcgataaccaccttatataaattgataagaatattatctctaaagtatactgatttttaacctatgaatagtatgaaaaaggttacagggatcgagcttctttaaaaaaacaaaaaaataaatcctctttaaaggcaacaagaggattttaatcacgtcctagttaacacttagctcctttaagtgttacccatccatgagcaagttatactctaaacaatgttgttaatgatatatgtaacttagtaatcaatataataaggatgttgttactataaccccctttgggatcgttaatagaatagataaaagcctaaaagggataaagcttaaaaaatagtgttagggtattaaaaagacttacagtagcaaaggctgcggtaaaacaagaaaagttgttataagcttgttggatgttacttaagtaaaatatgcgatcaataatgaaataaatgctaaaaaaacaccaattgctaatgacatttgttgaaattttttcttcttagtctgtttctttaacaaaattagcgtacaattactgcaatttttttactgaagatcgactatgtctgttattgcaattattggaataggctacctaattggggctgtactctcttttattatcaccttctttttaaccaaagatcccagcttagctatgcgcctgctgagtgcttttcttatcgcaataacatggccattgagtttcccaatggccattatattttctatttttggttgattatttataaataaccatgtaaaaattttttttgaaatgttctattataccataatttattatcctatatctctttagataatattatataatttactattccaaaattaattattatgattagaacataatattaataatgtttaaaatagtaatcttcaacagagatatctaaaaaatctctgttgaaaagaaaatataatttatattcacttacaacaaatatagagcttgtatattttcaaacaaaagtgaatagattaaaccaacacattaaccttatggatagctgaatcattatactgataatcgacttgaaatatcattccattatttttcaatctaacaattgcataactaccagcaccaagtggtacacaaataggaaaatcatccataggtattaaacaaagtgatggctttcctcctcctgaatgatttgcagaaataaatagaaatcgtcctcgacaatccatactaatatggactgactgaccatcagttaatcctttattactactaaatatttccttaagagtaacattccctttagcttgatatcgactatcactttccgccttagtataactactcccaataactgcataattccctttgggttgataattccccttcggctgatatttaccatctgactctgatttagaataactataacctgtcgctaaataattgcctttaggttgatatttattatcagattccgttttcgtataggatgcacccactaatgcataattgcctttgggttgataattcccttttggctgaaaagcatcagtagcggctttttggctaataacatgagccgttgaggttccggtcgcttgagaaatattacccttatcaaattttttattaagctcattttttaaattggtattagtggcataatctcctgaagcttgataattgcctttaggttgatatttcccatcagattctgctttggtatagctatcgcctttattcgcataatttcccgcaggagcataattgcctttgggctgatatttagtatcagattccgcttttgcatagctataaccttccgcttgatatttacccaccggctgaaaacgcttatcagcctcggctttgttataagcgcccacttcattcgcggtgatatcagcttttaactcagcccatgcattaccggcaataggctcaatattattattctcaattttagactgccataccttattgttatgataaaccacactacgaatagcatagggcttgcccgcttctgaccatttagcaaaaccttgtaattgcatttcaccaatagactcggtgatatcgtgaaataggctattcattttttcacgttcaatatcttttgcggccggatcagtgacttggtcacgctcataatcataaccgtaaccttgagtataagatactgagccatctgtttggatctctacaggcacaactgttttatccccttgcgtggcaaaggggattttaaatattttagtcataggatttattctccgaaattactctttaagaaatttttacgatatgaaccataaccaaatgcttttttagttatgatgcgatatttgacgcctacgccagaaggacgtggcattaaatcgaagttttctaataataaacgtaagcgttcatctggattaaaattaaaaacgtaatacatatacgtcatatcaaagggatcaagtacaaatactttactttcacctcgccagaaaaaacgttttaaaaattgattaatattggtgaccgtcggactttgggtgagattaaaataacgcattcttatcaacattcttttttgatctaacgtcagtgataaggtgtaatcggtattgcgtcgaaaatttgcgttaaaattagctttctttttaccaaagccaaaacctatttttgttttctcacttggggaaatatcaatgcctaaaggcacatctaaaatacgcgcccagactgctaaaccaaagtcgttggcggtatcaatattaaatatatcgcgataccaattttgccaaaataacacggtggattggtgaaaatagtctgccttaaaatgagccagtgattttaatttatcggcattttcatattgccaaagtatcgcttgtagaagatctgaatgataatcaaactgttgaatattcataccatcaccacttgtatcgcccctttaggtaagcgggcaatttgattaatggcaatgggaattaatgctacatgccaattttttccatctgttgataactccacttttgtgacaaataaatgtggctccacagcattgacggcagcggaaatctcaaaaggagagacatctcgccctaccaccagcccattatccccctctatctctccatgactccatttttctagtgcatcaggaataatggtttgtgcatcaaaagaggattttttaacggtaactttgcaaaaaatcgtcacttcttttggtcgtgaaaatttaatcggatatgcttgaccacttgctggctctaagagatttatttcaatatcaccattaaacgccgcacctattgttttcgttcttaataaaacattggcaatttcatggctgtctcccccttcaacacagacataaatgctatgtggcaataaggaaataccatcgatagttaatgttttatcagtgaaattttctcgaaaagagagagagttaacccctgctaattcatagagggacgatgtaatagcttgggcaacactgatggtatttttagcaagagtctgtttacgccgacgcctggctttaatatcagattctgcataacggccaataatagcgtgcgtggtattattgactttttcccagcctaataccgaacttgccactttatttaattgcccaataccacaagtgataggcccgtactctttagcgcgcatatccccagttatttttccagtgtctgcgataataagagaggttaatgtttcaaatactgcgccatttatcgttagagcttgtgaacctttagggataatggtgccgggcactcccataaattccacattacttaaataggagtgtgtggcattaatacgctctcctcccattaacgcccatattgcatcaagaaaaatacccccagcaatatcgggattaatttgattagcaagttcggcattattacgcacaatggcatcgcgattttcaatttccattgttgccaaaaccccttggggcgtttctggcgataaattgattgattgcccaaagacagtgcgaaattcgtcttctacctcctttcgtagcgctgccgtatcaggaacaataacacctttattattaatatatcgataatcagccatgtaatgtaaatcctccatatatcgtgcgtatatccgcctgatatttcagtacgccattatctaaaaaggcattaaaatggctgatagccacaacttcctcgatttcagccagacgttgtcgaaaagccatttcaaataaaggaatatcaacttgacggctaaatgttgctgaccaataaggaatacctttatcttttttatgcaacatctcaccacgaaccgctttaataaaatgctgacaaaggttttttactgcttcatcgttatcacaaatttgcagatcacctttagcatcaatcaccagatcattatgctggtttatagcaaatgtcctcatattggactccctgtgttatctttgcctgcttgtacgccactatggcgatgggttgaaccgatatctttcccgttgtgacgcatcacgcccccttgagaatcactatttccatttaccgcataattaccatttactgtgacattgccggtaaatatcgtttctggggcattgatttcatacttgggggtttctagtacaactttatcgttatgaagagaaaagcagacagaaccatccattgactgaataaccaaagcatcaatattttttccgtcgatcacccaaccttttaaggtgtcaggaaaaaacatcgcatcactaaaggtatgtaatcgggtggtattaggtctatcctctagaccaccgcgttgaaaaataaggctaatatcacgatcattagcttttaaccaaccaaaatctcccgctttaatcggggctctaataaaaaaacctccgccaccaaagcgaaatacgggaatatttgcaacgggtgctcgtgaaatagtttgattatccgtggttaacatcatcaccagtggtttgatcacggctcgattgcttttttcatcataatcaatgactgttgcgggcaacatatcatccgtattcatcatcaaatggcgaaatgcggacgagaaagcccctgccagtgaaccaacactcgcaatatcgttattgggtttactcataattaagctcgtttacaaattgcggtatagttgaagtcagcctcatgtgaggcaacactaaacgctaattgctcaatgatgtaatcaccatttaatgaagggtttaatttactctcaaggcgaagcattccaccaagctccgaggtgctatcaatcaagtaacttacggttaacccactttctgtcgctttgggaatgccaatcatgcctgaattcatatttaaaatacgcaaacggctttttagtgctttgtcgtcatcttttacaaataacgtatcatcatcaataaaggctttaacgtccccagcttcctgtaaacgttctatttgatgcaatgctgagccacaataataccaattagcaatattcttatcggtagcttgaaaatctagtttcaccccacagtcatcagcaatagccaaggctatttcactcagcctgcgcattgtgccgccactggaagaaataatttttcccgcgctttgatgactggtttttgccgataaagttaacgtcacatcaggaggtgaatctatttcagcactgacaatatcgccaataaataaagagagtaatccggtattaactcggccgacctccaaatagagtcgtcgcgtttgcttattgttattatagggactggtttctgtcagcagataatctcttgtttgtgcatttagccctgagatagtgacattacattcattttgtaatggattggcatactttgttccactggctgaaatacgtaatccctcataccattgaagccgttctccgacttcaattccgagccttattcgtcgaagatccatcttcctcactccaatacactaatgattgcgtcttggtaaattcctcataccaaggtaatgcatcatgctctgttaaaaacattaaattaattccctgatttaaatagcgataaggaattatcggtgtattagcgacaaggcgcattcctgtaataagtatttcaccttctcgctcgatatcacaaaacatggtttgattagccactttaagcgttaattgccaattcacaccagctattgctacagaaaatcgttgattaggaatggcttgtaatggtatttcttgcattttttctacctcctagccctgtttttttcctattggcatggattttttacttttcacatttcctcgattaatcgttgaggattgcttaggttttttagtcgatttagctgattttttattgtattcaggctcaatgcttttccattcaataaacttcagttttaactcaatagcgtctacttttgacggatcttcatcatggctaagactttctaatagcattggttgataggtactaacacgtgtttgaatacccactaacgtattttcgtcatataactgttttatagtggcataagcattagcaatatcacccgttaacaataagctgatactgatactgatggggttgatcaccacatggtcactgcgactttccccattttctaccgtaaatgtaatcgcttggtggctatcgtctatggtgacttgagttgggttaacactatcaaacaatgtggtaaaagaggctaaatcaaaaattctaacttccgttatcataattacaccctccagccactagagtgattctgcgatatatttttagcttcttgctctgtataagatttcttgatttctttaaccacctccgcaccatttgtggcttgagtttcaattttgatttcaccaatttgcacattactttcatttttaatgcttgattgattactgatcatttgactggtcatcgggtttaaactgttatttgacgatattgctaatccgttatttaacgatttaacctcctgcataggactataataccgtgtcgctgtttgagattgtggcaagatatagtcaagctccccctcatttgttaatcgccgctctaccttttgcaccacacgaatttctttttcttcgtcgtccataccgaaaaagcttttggctgattgccatatatcttgtattaggttgattttttcatcgacaaaatccaatatcttttcaacacagccccacatccattcaaataggctcaccactgaatcagaaacaaaaataaagatatcaataatggattgcccccaagcaataagattattaatccctatttctagagtctgtataaattggttaaatgagttagatattaaatcccatgcagcaataacaaaatcagcaacaacagtgacagcctcttttaaatattcaaagaatgattgccatgcctgccatatcgtcatgatcacactttttaatactgggtatttttctaatatacggccgatcatggaatcgttaccgttaataaaattcataatatcgtcatagacgagtttaaaggcgacacctaataaaccaatcaccgttgcaatagcaataataggtaatgccatggcaagtgtcgatgcggcagcagagatcatgacgggtaaataataaatagcaacagcggcgccgatggcggagaaaaagctaatcacaatatctttatttttcacacaaaaatcgactaatttatcaaaccattccataccttttgccagcgtaggaataatcatatctaaaaagttatttttgaattgtgccgctaattgactaaatttatgtattgtgacattgagttggatcgcactttcaatactgtcgtcgttaatacctgagaattgtttttgtacctccatcctacgctctagctcttgacgacctttcatcattaattcgatggttttatcatcaacaacacctaatttttccagctctttttgggcatcatcaaaactcatatttttaacgttatcagcgacctgtaaaagctgctctatgggatcttgcgtatcatcaaacgcatttgccatagcggctaaatccgcttgagcagcttctttcgtgccaccaattgcagccatcgcacctgaaaaagcgtcaatatcaatcgccgcaacacccatttttttactgagtttatctaatgattcgatttcttgagaacgttcaagtgacgcagaaaataccttttgtaacgtccccataatatccgtagcacctatggcgtttaggataaaatctttcattttatcgacggtttgctgataacttttcccggtttcatcaacactactgcttaatcgacgttgagcttgagcttcttctattgccgctttaataccttgggtttgcatggtgctgataaattgatcgtaatcagcacctagatttttaatgacttcatcaataactaatttattttctttatttttcttttctgcctcagttaataaagttaattcattatttaatgaagcaagctgatcttccattgcctgatattcagcatttaaattcgcaagatgacttgcatcactatccacatcattgctgagcaaatttctcgtgtaatttaatactgacatcgcttcttttagagcgtcaatgcttgacgtaattgaatggatcttctcttgtgtttcaccactatttatttcaatatttatgggctcatcaagcgataaactcgtcagccccattaagatattttgcaaaaaagtatcaaattcttgagtactactaagtgccgttttaacgatttgttgtatcgaattttcaacagtttcagaggcttgaataatttcttggttgtccaccgaaaggtttatttcaggctccagtgataattcgttaaaactggcggctatttcttgaacaaaggcaaaaaagcgattaatacctgctgatgcgccctgctctattttcttcatttcctcaagaatttcgttggtcgatttcctgatattatttaatgcgttatcagatacctccgcgtctaacgtcagtacctgactaaatacgggtaatagcgacattatctctccttggacgccgctagcgcctcgttataacgattggtaatcgcaatttcccacagatcaaaagcttcctctaaatctatggttgttttgagttctgtgaaagaggcgaagccggctgagatgatgacggcaaagaagccatcagcgtttttataatcgacgggagagaaccgctgagcttgcctaataggtattgaaggaaattttggctcccgccgttgccgaaaaaactggtgttgtactttaacatttctaattcaagacgaattaacgcttccccatcagggacgtgattatcaattaatgtactggtttttaaataaatttcttggccttctttttctacagcaacatacgccatcatctttaacatggcctctttactgacttcataatcaccgattttaggggcatttgataatgggtatttagccaagatctctcgtccaattgtggcgggtaaccggctaataataaaggtatgctgttgacgatcactatcaatcaccgtgatctcttttggcttaatcaacatataaaaactccataaaaaaaggcgaccgaagtcgccatgataaaaagtaagattaatatttaacgcgctctaacacggtcaaaatcttggaaaataaaagtgtactgcttagatttaaggcgtcctgcccctgcgactgaattacctcggcaaccgtcagtaatacgtccattacgtgccgtggtaatagagccatcgccataagaagcgactaaagtaatcacatcactggcaggacgtcgcccccgtcttgccgtattagcatcaaacaaaatagctagattttcgtcttcttcacttcccgctaacacattaatggtgaccgtttgaggtgttggtgaagaccaactgaccaaattaccattaatatctaccgctgtttgtgtaatattaactgtcggtaaatctaaaggatcaccttcatcagaaaaggtggtgatcgggatacccgctggaaatgttttacttgcttgaataataaggcttaagcctgttgctgaaatatcgttcattgtttgttccttaaactaaattatgtgagccttcaactttacgaacccaatcgcctttaccgtaaatcaatacatatttcatggtgtattccggtaaattccctggccctgtttgttcaacgatttcagcgttgtaccaataacctttgttttgtacatcgtgccacgctaaatcatcacctgccgcatctgtaattgcgattttttgtacttctgttaatgctttacccgtttgaatagtgccgttatttaacgcctttgttactgccccagcaatgatcatcatcgctcttgcttcaccatctttattcgcaggaataccgcgcgttgacagtagtaaactaagccactgctgtgcaatatacgcttttagccattgctcattggcatgtacgctcatatctactggattagcaccattaccacataaaaagccacgttgatagaaactgatctcagagccagataccgccgtttcaccataatagttcacgcgcaatttatctaagcgatcggccgccatatctgtggtaacttgcgatgggaatgtaataccaaattgtcgatacatgtaattggtggtggcattagtacgctcaaaatctgttgctgccataattgccataggcaacgcttgcacaaaaaagttttcctcggtttttaaattcaaccctgtcgatgcggtattcattaatgccttgctgtacatttcagcttgttgatctggcaccgataaataaagttggtatttgacattttcacctgctacgtattcagccagttccacactttgctcaatagatagttcggttaaaaatgttgcactaccaaatgagtcagaaatagcttctgcagccataaatgcttcaagggcagtctgtgatgcattaccctcagaagtttgtccctgacttaaccctaaggcatcagcaagaggtgagttgttgacgctaatctgcgctttttcttgcacaccgccgctgattaagaaagcactatccatagcattaaaagtcacataacaactggcaaattgtggctcactttcagcattgagttttgcttgaattaaagatgcaatatcactataggacgtcacgtcttgaagagagagcttgctgatttttttggtcacatcgccaatcaccagcgttaactcaccctcttcaatcagctttaatttatccagtgtggcaaccggcccaccaaagagtgttggcgctcgtcccattggttcataagaggcaatttgtagctctttaggcttgctgacgggagccggactcacataactaaaatattggcgggcaaattgcgcttctggagaatcagctcccagaaacgcatcaacttgaccagaagtaaattcgagtactttccctgctggaattttagggtttgttgaaaaaatacgtgcggtcagtttacgcattggtgcagtagagacaccaatcaccgcactcgcaatatcaacatagcgtgtttgtttaatagacatatttatccttaaatacgagatagattagatataagtaaatgtgtagctgcagtgtttagagataatgagcagggaaaagtgacattaaaatcaaatgaaggattatgttcatagctatttccttcattaattattggcgcacgcctaatttctgtcgcacgttgtattcctattcctttttttctcattgattcaataaaaggcagcgaatgaatgatcattcgcgttgttctaattaaatcacctgcagtaaaatcagattgttttttagtaaagctctgaacttgataagttaactcaacaagttgttgttcagtgtgattggcattattaccttgaacatcataacttcttttctgccaaccttggctcacctccttaataggaaaaaacataataatattattatcagtgatttcttccggttgatatcctgtaataacttcagcattgatatctgtttttattaattgttttattaattgctctcgaatagctttattaatatcattatcattcatttcatctcctttattttacactcctttttaatcactttaattaatacactcttggcgaatataatcttgtagacctaagatgatggactctgactgagcaattctttctctgagtatccaataatttcggatagcggcgtcagtaggtctggcgcgggttgcatcatccacgcggggggtggaattggcgtcgtttgttgcacaactggctctgatgtacacccgctcaggatcacgctcagcataactacgcaaccggtcaatttcgctcttggcactggctaactcctgtaaacgttgagtatccatttgatataattgctttattcttaattgatagtttttgttttctacaatctgttgcgtcagtgtttcattaattttcacatatttttgttttaatattttatttctatcaataacccaaaaaagtccagcaattaaacataacataatgattattatgatttttgtaagattgttcataataacaaccaagcatcttcaaatactttttttgcatagggttgataacccagttcaatattaataatggctatagataaagatatacaaacattttttatttgggtatcaataggtttattactttcaatccctatttcttttgatacgcgctcaatataacctaatgtattattctcattaggtggtgcatagcgataaataatagttttaattgtatttaaaccatattttttttgataggtttgaattaatttataaattgctctgatgccatattctggtgaaataaattgacaaaaatctttatctgtttgcgtgcttgctaatccttgccattttgcaccatggcgtatattacctgggttattattacgttcaccccgcgctattttagccatttttaactcctatttttccttataagaagtttgcttacaggttcaatgcctacatagccaataaagacactggctaagtaagcaaattgatgattaatactaaataaaaggagaatatctttgataaaccaagcaaacattgcacacatcagtccatctaaaaaagtttttttccatcctcctgcgttatataaacttcgaagaatagccattcccccagcgagtaaggctgatataccttgctctttcattgaataaagaacaatgcatatttgttcccatagatctggattttctttcattatttcttatggcttacctccaatcagaggaaatgtcattaataatatattcattcttcatatctaattttaatcacaacgctaatatgaatatattgacgattttatttatctaataaatgtagataaaagcgtagtataaaaaatgccataacataaacctattggcagtgagatcgattaactcgccaagcttatataatggtcagtgtgatagtgataaatattgaaaacaaaaaagccccacttcaaaagtgaggcttcttagattttgctgagagcttgttagatacaaatctctcactgtggagttatagtatgcttatttttcctttaagtcaacaatattttttcataaaaataaataaaaatagaaaattattattttatagtaacttcttgtagaaatttatctgataaagactcttctttaaagcattccgccactaaaaaatcaaatagcggtttataatgactataagcagccgtttttgaaatactcaccacatgttgcaattgttgtaagacttcgctgaatttaaggcgaggataaccgcgtccagcacattggcgacaaggtttaaatacggcaactccttgtaattcagtctgttttttatcaataatttttccacgtccatggcaacggcatgctaaacgaatttccgctttacctttgcatgtagggcaaataacgcgtgttacttcccttacctctcgaaaagaaggtttatttgatgaggttgtttttagatgaggtttggcattttgagtaacctgccgggttgtttttcgaccatggcatttggtggtaaaaacttcaacttcgataaagccatcatcacaatcaggacatgctctcttgctggctgcacttctggcataatcctgaaaagcatattcagcgataatatgtaaaactttagctttatcatgttcagctaacttatcaatcatcttatattggttaacttgagttaatgcacattgatacaggctttctatcgcttcttcgggacggttaatgtggtgtttcgctaaaaatagctctattcccattcgccctttacgtgtcgctaagcttattgaagccattacatccgtaatggataatgaatcaacagctttaggcgttctaacatcacttaatacaacactttttggagaaaaatacttaggtaagtcagctaatctcatacaatattccctttgatttactgtcacgacttatttgcttatccatatcccacaacaagttaggggcacttacatgcctgcttaaatcaccattagcgtattgatgcactcaatgctattttatactcaacctatccgttatggttaatttagttaacaaatcatgtttaacatacttttattaactgttagttaatgctagtatgtaactaaagtcacgtcaagatagaaaaggaaattaactagtggttaaaaatgactataagttagcattcacaaaaagactacaagaagcctgcctagactccgggattgcgggtagagggttaggtaaaagaattacagaggcattggctaaacaaggaataaaagtcagtgcgcccgcggtctggaaatggttaaatggtgaatccgttcctgactcaacaaatattttagccttaagtcagtggctcgatgttcgagctgaatggttagaatatggcagaggcgccaagaaaaatgatggcatttcagttaatgaaataatgcctgttaatgattgggataatagtactcctatagagcgagatgaagtggagatcccattttattcaacaattgaattggccgcaggttttggcagttgtaccactgataatcaaaaggtggaattattgagattctctcgttctacatttaatcaatatggtgtacagccaagtgatgctgttgcttttaaagtgcatggcgatagtatgtcaccagttattcctgacagctctattgtaaccatcagtacagggcatactaagattattgatggtggtatttacgctattcagcaaggtgacttgttaagagttaaaatcttgcaccgcctacccaataataaaatcattattcgtagctataatacgattgattatcctgatgaagaatcaaccttagaagaagtaaaaatcttagggcgtgtttttaattggtcggtgatgggctggtgatcgctttaggaaaagtgaatgaaaaagtgaatagtgctaacactaggcttactgatattcaccgttaagcctaatgttagcttttttaaatacaatagctcacaagatcaataatcctagaccacgttttacttcatcaagcttttgttgagtcacttctttcgctttatcgctcccttctttgatcacttgtaataaataagctttatcattaataagttgcgctcttttttcacgtattggttgcagaagctcttgtaagatatcattaagcatagctttgcatttcatatcaccaagtcctcctctttggtaatgagccttcattgccgtcaccatggctttatcttggcaaaaagcatctaaataggtgaacaccacattaccttcaatatgacctggtgatgcaacatcaatatgttgcggatcggtatacatcgaataaaccgcttttttaatttcatcggctgtggatgataaattaatcgtattacctaaggatttagacattttcccactaccatctgtaccgggtaaacgaccgacttgccctactacgaccttacaacttgtcaatacgggttgtcctattaagctatttattttggtgacgatttcattggtttgctcaatcataggtaattgatcttctcctgcgggcacaatatctgcactaaatgcagtaatatccgccgcttgactgacaggataggttaaaaatcccgccggcaatgaacgagaaagatttttttgcaaaatctcatgttttactgttggattacgctctaagcgagatactgtgacaatatttaaatacagcatagtcagttctgataaagccggtagtgcggattgtaagcataatgtggaaagtttcggatcaataccaacagctaaataatcagccaccacatcaaaaagaaatttactgaccttttcaggtgttgagccattatcggttaacccttgcatatcagccattaagatatattgtgtcgctttcttctgaaattcgacacgttgctgaagagagccaatataatgaccaagatgtaaaggtccagtgatccgatcccctgttaaaactatcgatttattttcagtgagatatttgttcattgcatttccttcgttgggataaataccgccagagaaatgccataaacaacatcaccgcgctctggcggcaatagtgttatttatataaatcaaagataaataggactaggtgccgcttaaataaagcgccaccaattttgaattgatcttaatgagcgaggtcttgtattcacaatctttccttattaacttatttagttgtatagcagttttatctataagtcaatcaaggaaaattatcctaagatcatcattatcccaacaagtggagataagaaaaaacccgttacctcttacgagataacgggctcttatatggtgccggctaccggagtcgaactggtgacctactgattacaagtcagttgctctaccaactgagctaagccggcgaattctggcggaaggatagagattcgaactctaggatggtttcccatcggcggttttcaagaccgctgccttcagccactcggccatccttccatggcgcgcaattatgcctatctctgagcttgctgtctagtcctgatgataaaaaaaatgttttttttatttgtttgcttaaacttcagtcgaattttgcctaaaaaacgataacttattaatttagtggttaaattttgtgagtttttgctttgtgataatggtgctttacagataaaaacgatgaataaaggcgagaaaaagataagaaaaaacccgctatctcttacgagataacgggctcttatatggtgccggctaccggagtcgaactggtgacctactgattacaagtcagttgctctaccaactgagctaagccggcgaattctggcggaaggatagagattcgaactctaggatggtttcccatcggcggttttcaagaccgctgccttcagccactcggccatccttccatagcgcgaaattatgcctatctctgagcttgctgtctagcattcagcgtaaaaaaaatgactttttttgtttatttgctcaaacttcacccgaatatcccttttaaagtaataacctgttaatataatgacttaatactgatggttgtttagccaattttttcttttttattgacttcatttcttaaaggctcgcaaactgaatgcgtacactgacccaattaaagccaaatacattaactcgcttatatgctctgtttcttctgtttatggccatatccctttttctatatgcttatagctattttgatacttggctagaaagtaaaaaaaatgccattaataacacgactaataagtttgcttctcaagttgaagattaccgctatcacgctaaccaactattccagttatcaaacaaaattaatgatccaaccctctttctgcctttaaaaatcaatccggtcaaactacgctctgatgtttattggcttgaaggacgcgatcagaccgttgacgctattgtttttggtaaatcgaatgaacaaacctttcagttagccggttattttgcaaacgcgttagaaattatttggggggtacgtaataactatagctctctctattatcttaatggtaaaggcaatgatcttatccttattactacccactcaatactaaaaccagaattgcgctataaagaaagctatttaacactaacggctgaaaacaaacgttctgagctattaatgcaatcaacggcattagatgaaaaagagagcctttctcccattaggaaaatgccgacagaaaatatttattactatacctaccgcaccatgtttaatgtgccagggcaactgaccagtgttattgcctttgatttacccataaataattttctacctgctgagctatcacctcaatatttaagattattacccacaggacagcagagtgtttatgataaaaacaatattgaggtatcaacggatgggacttcactcatcttctcacagcccatcgcaggaataccctactctttatcttatgagtatccactaaaatcgattttcaatgagattgtgtataaaaatatctggttacttatcagcctactcatttttatctcgatttcagtgtttggccatatctatattcgtaataaatatgtattcccttatatttcgatgacgcgtaatcttcgcatcaaagaagagatgactaacgatatcatttctaatcttcctattggtctattggtgtataatttttcatctaaccataagattattagtaatagccacgcagagaaactattacctcatatcgatttatctaagatccgccagatggcgattgaacataatggtttaatccaaacggccattgataacgaaatttatgagatccgcaccagtagcaacagcaatatcgataatactgctctattcatttttctgaataaagacaacgaagcattaatcaataagaaattgcagctagcacaacaagaatatgaaaaaaacacgattgcacgccgcaagatcttatccaatatgtcattggaactcatacgaccaattaaagatattaatgagatggtatatcaatttaaagatctacttcctaacgatactcaccaacaattactgagtctgctattagaaaaaacgaattatatttctgagtggatagaaaacattacgctaattaataagttagaaaatcaagaatggaaaatacatcaagatgaatttgaactttcaacgctagttgaatctattctaataaccgcatcaccatttatgataagaaagggattaacactttatttccataataatattaaacctagtttacttttatttaatgatggcccagcattaagtaagattattttatcattgattaattatgccattagtacgactaattatggaaaaataaccgtcaatctaaatttagaaaaaaataatgataaagaagaaatagtaattgatattattgatagtggcagtgggttaacagctcaagatctggctaatattaaatatccatttttaggtcaagctatgggtgataaatattattccaactcgggtattattttttatttatgtcatttgttgtgtaacaaaatacaaggcactttgaccattacaagccaagaaagtattggctctcatttccgtatcgtacttccataccagcatatagatacagaagagcgctcttttgacatattattagagggtataactgcaaaactcgccataaaaaaccctgaaatagaaaaaataatctgccaacagcttgataaatatggcgctacatactttgataaaaataaagagaatctttactcagaatacgatatcatacttagagacactccggataataatcctgaatcagcaacagtattattagttagctctattaccggatttgaaaaaatagcaagaaatttaataaagtgtaactataacttcggtgatccattaattgaggctattacttatttgattgaagaaaatgaacaactttctctcgaaacaactcaaacgagtattcgtaatgagaataataaccttgatcatcacgaagtaattcttaataattataggaagaagttgaatgatagtgattataaggaactatttatcaatactgttcccattgatgttgaaaaactacacttagaagcaactaataaagactttcattctctagctcagacagctcatcgtctgaaaggggtttttgctatgttagatttagaatatctcagagagaactgcgaatatttagaagatgacataaaaaatcataatgaattagagataaaagaacgtatcaatcaactggataaatggatccgacagttgctgtagcaaggtaacaattaaacatgaataaccttaatattattattgccgatgatcatccaattgttttattcggcattcgtaaatctttagaacaaattgaatgggttaatgttgttggtgaatttgaagattccacttcacttatcaataacttatctaaattaaatgcagatgctcttatcaccgacctatctatgcctggtgataaatatggtgatggtattacgttgataaagtacatcaaaagacattatcctaatttgtctattattgtactcactatgaacaataacccagctatcttaagtgctgttcttgaccttgaaatcgaaggtattgtattaaaacaaggtgcgcctgctgatctacctaaagcacttgcagcattgcaaaaaggcaagaaatttatgcctgaaagcgtggctaagctgttagaaaaagtgaatgccaatggttatggtgataaacgcttatctcccaaagaaagtgaagtgttgcgcttatttgccgaaggtttccttgtcactgagattgctaaaaaactcaatcgtagtatcaagactatcagtagtcagaaaaaatcagccatgatgaagctcggtgtcgacaatgatatcgctctgcttaactacctatcatcagtcactattgataaggaaattaacggagaaagctaacccgttaacttttcttctctatgctgtatagataaaatcaggaagctcatacccattgtgggagcttctctgcttttttattactttttatccgccatcacatcgttggcaacaaaaaaatgttttcccctcttcccctatcatcctgagccggcaacctagcaacaatatttatcactgtaatatcgaaatttttcaatcagatctaccatgaaaaaacctcgtttttccgagattaatcgttggattatgccacataggtgagtaatacgtcttttaatacagtaagagagactggcttggaaacacaatcattcattcccgcatcaatacaacgttgtttttcttcggcaattgcatttgctgtaacgccaataataggaatagtgcgactcaattcacgcactgttgtcgctaattgatagccattcatatttggcatattgacatcggttaaaataatatcgacatgattttcttgcataaaggctaaagcatcacagccatcttctgccgttgcggtattaaaaccaatttttttcagttgatcggtcaacaataaacgattgatagggtgatcatcaacaatgagcactgtcaataattgtagatcgtgatccgtcattaacgcattattttctgagtcatcagactctaattttgtttgtggtaattgtaggataatcttaattaattcatttaatttatatgtactacataaccaattattctcagagattttctttgcaggctcaaaatagtgttcataaatacggataaattggcaagagttatctaaacattcatcatgatcggtgataataaaatcattctcagatacctgagtcacttccgtgaataattgacaatgtaagcccacataacttagatatcgttcaacaaagctttctagatagagatttttaatactgataaagcagcgaatagtactctctttatagagattatatttggtttgtccatcactcgaatttagtgccccatataaagggatccgcacagtaaaacggctacccacattttcttgagaaacaacactgatatcaccatccatcaagttaatcagtttttcacaaattgctaatcctaatcctgtaccttctgaagcactttctgtattttgcgagacctgaaagaagggttcaaaaagctgatgaagcattttttcatttatccctctgccggtatcatgaatatcgaaatagagataatattcatctcgatacaggtgcaaagtaatacatcctgtcgtagtaaatttaatactattatttagtagattagagataacttgttggacacgaaccggatcgttattaacgattttaggtacatccggctcaataaagcagtaaatagctaaatcttttttagcaattaacggcaaatagttagagataacaaaagagacaacttggcgacaattgaatggtttaacgtcaatttttaattgtttcgattctatcttcgagaaatcaaggatatcgctgataattttgagtagcagcgatgaagagttatccattgtttttaataatctggcagtctcttcattttgcgtcaatgattgtaataattctaagttaccaataatgccatacagtggtgtacgcagctcatggctgactgtcgctaagaacattgatttagcttggtttgcttgttctgcggccgttgccatattttgtagagagcgttccattttaacacgagcgctgatatctactaatacgcaaatcgccacatcttcattctgataacgtgaattcacaaaactaatttgcaaatgattatgattattagtgaccacatccactatattgctacttttttcagcaataatagagagaatattttgtttatcactatgacttaataagcgaaaataattatgggcgagctcattacttaaaataatcatgccatcacgtattcttaagatacttattcctactggggctgacgcgacaattttatgattaaactgctcatgctcctctaagcgtgaagcattattttctgcaggtgaaaatatttttcgctcaaaaatccaaacgaaaataaagataacaatcgccgaaatgatatttaaaataatggcattaaaaatagtaaacttaaattcatttaaaatttgttttaatggtagtgaataaaccacactaaaagaagaaggaagtagcttacgttttgcaactaaatcactaaaatcatcatcaaagccaaagtaaggagcactaacatccggtacatcccttacactgcgataattattctcttcaggataacttaagactggattatttttattgtttaaaagatgaatagagataacgcgatctttcgtaggtgaaaaatactccaatcggatcgccctttcgataccaatgagtgcaataaatttccctgacgcataaactggcgacatgacatagaggataccgctatcccccttggcatcaggtactatccagtattgattactctctttcccttgagctcgttgattaatgtaattacgtgtattttcataaaccatttttttcaacagttcagtatcaataggtgatgcacgcaatgggaaattaatcatacacatactatgagagccaaccataaatacttggttgataccttgtaaagcaggggtattatctttccagtaatacagaatactattaaatgatcgaaaataattgtttgtttgccctttgaataattcacaatcggcactttcacttaatttatgaagtgaaaaaggcccttcataaaaaaaagaattattcatcttagggtttaaattgagttgctcttgatgccgctctgctaaatattgcaaatcgcggatagtactcgaggtttggcgaaagaagcccaataaatcggtatagttattactatattcttgtcggatatctgatttagtatcattaaagatgttgatgagataaaacatggttaataatgcgcccattgcccacaacatgatacccagtgcacgaaaaaggtagcgggaaatttttaatgacgttttaaatgacgaaagatatcgcaaataaccaccctaatcggtaatacagataatcaactttctcattctaacagaagttactctaggtctgaatgagatgatctttatcatcaggataattttttctgatgactgataaaattttttgactaataaatgcttataatataaaaaagcaggcattccgcctgctttttttgctttaagttactgaaaaatagctattattcttcttcactatccgcatcatctgttggttcagactctggaacatcagagatattgtcgctgatcatttcatcaacttcatcatcatctaatgcatcatcttcatcttcaacacgttgtaagccaacgactagctcgtcttctgtagtacggatcaaggtaacaccttgtgtattacgtcccacaatgctgacttctgatactcgggtacgcactaacgttccggcattggtgatcatcataatctggtcagtttcttcaacttgaatagcgcctaccactttaccattacgctcactcactttaatcgagataacgccttgtgttgcacggtttttggttgggtattcactttgaacggtacgtttaccataaccgttttcagtcactgttaagatatcaccttcgccacgaggaatgatcagtgaaaccactttatcatcatcaaccagtttcataccacgaacacctgtcgcagtacgacccattgggcgaacacactcttctgcgaaacgaaccactttaccatctgctgagaacagcatagcttcattactaccgtcggttaaatcaacaccgataagctcatcgccatcatttaaattaaccgcgataataccagcactacgaggacgactgaagtcttgtaatggtgtctttttaaccgtaccgctcgccgttgccataaagacaaatttaccttcttcatactctcttactggaagaatagcggtgatccgctcatcttgctctagaggtaataaattgataattggacgaccacgagcaccgcggctcgcttctggtaactgataaactttcatccagtacaggcgaccacgacttgagaaacacaaaatagtatcgtgtgtattagccaccagtaggcgatcgataaagtcttcttctttgatccttgcggctgacttaccttttcctccacgacgttgcgcttcataatcagtcaatggctgatatttaacgtaaccttggtgagatagtgtcacaaccacattttcttcattaatcagatcttcgatattaatatcagcggtattttcagtgatttcagtacgacgaggatcgttatattgtgttttaattgctgttagctcttcacgaataacgtccattaaacgctcagggcttctcaaaatatgcaataactcagcaatttgtagcagtaattcacgatattcatctagcagtttttcatgctcaagtccggtcagtttctgcaaacgcagatctaaaatggcttgtgcttgttgttctgttagatagtatttaccgtcatgcacaccaaattgtggctctaaccactcagggcgagcaacattgctatcaccagcacgctctaacatcgcagacacgctaccgagatcccaaggttgggcaattaatgctgctttcgcttctgctggggttggtgcttgacgaattaattcaatcacaggatcgatattggccaaagcgaccgcaagtgcttctaagatatgagcacgatcacgcgctttacgtaattcaaaaatggtacgacgagtcaccacttcacgacgatggcgaataaaggctgcgataatttcttttaggttcaataattttggttggccttgatgaagcgcaaccatattaataccaaaagagacttgcatttgagtttgtgaaaagaggtgatttaatactacttcaccgactgcatcacgtttgatctcaacaacaatacgcataccgtctttatcagactcgtcacgtaatccgctgataccttcaatacgtttatcttttacaagctccgcaattttttcaattaaacgggctttattcacctgataaggaatttctgtcacgataatggtttcgcgacccgttttctcatcagtttcaatatcagcctgagcacggatataaatctttccacgccctgtacgataagcatctaatattcctctgcgaccattaataatcgcagcagtcggaaaatcaggcccggtaatatattccattaattcttctatggtgatgtcttcattatcaacataggcaagacaaccgtcgataacttcaccgaggttatgcggagggatattcgttgccatcccaacggcaatacctgaagagccattaactaacaagtttggaatacgggttggcataacagccggtatattttctgttccatcatagttaggaacaaagtcgaccgtctctttttccaaatccgccagcagttcatgggcgatcttcgccatacgaacttcggtataacgcatagccgccgcggagtcaccatcaactgacccgaagttaccctgaccgtcaaccaacatgtagcgcatagaaaaaggctgtgctaaacgaacaatcgtttcatagacagcactgtcaccgtgcgggtgatatttaccgattacatccccaacaacacgggctgattttttataaggtttattccaatcgtttcccagtacattcatcgcaaatagcactcggcggtgtactggcttcagtccgtctcgaacatcgggtaatgcgcgtcctacaataacggacatcgcataatccaaatatgagcttttcagctcttcttcgatattaactggtgtgatttctctggcaatgtcgctcatggagccactgtccctcatactacggattcaaaggtgtagaactataccacaaatcgccaattttaggaaaactgaaacaatgaaattaatcactctttcgcgattctcttcgatttagcttcgatttcgctctctaacattggtagaatcatcggtaatatgaaaataggagtaatactttctgatgaatgataaaacaacctctttgcatgctaacgtagatcagcatgaaatcgacaaatttgagagtgtcgcatcaagatggtgggatcttgaaggtgaatttaaacccctacatcgcatcaatccactaagacttaattatatccaagaacgtgctgatggcttatttggtaaaaaagtactcgatgttgggtgtggtggcggtattttatctgaaagtatggcccgtgttggtgcagaagtcaccggactcgatatggggaaagagccattagaagtcgcacgtctccactcactggaaaccggtatccctgtcacctatatacaagataccgttgaaaaccatgccgcagaatatccacaacgctatgatgtggtcacttgtatggaaatgttagaacacgttccagacccttcctccattgtaagatcatgtgccaaactggtgaaaccaggtggacatgtattcttttctaccatcaaccgtaataaaaaagcgtggtttatgctggtggtaggcgcggagtatattctgaatatggttcctaaaggcacccatgatgcgaataaatttattcgtccttcagaattattaagctgggtcgatgaaaccaatttacgtagcaaaaatatgattgggttacattacaatcctattacagacaaattccgattagcgccaaatgttgatgttaattacatggtgcacactcaagcgaccgataattcggatttgtgaaatagagagattgatttggtttaataaaacatcaaacgatcacatttttaaaaattgactttgcctctttttagcgtcgttttaagtttctgactgcctgtatttatgcagggtacaggcagttgttaaaaaaattatcccctatttatccacagaaacattcagatttgtacacttgatcaatccctcaattaccattatcttgttatcaccatttgaacaaacccctatatattgtgtttccttaaatttcacaccacaagactccttggcaatgtttgtcatcgggagcgcttttttgcggtataaaatttcaggttgcccatttataggtcattaaagccagaaaggtgcatcgctcatgaatcacagcctgctcgtcacaaaacgtgatggtcataaagaacgcattgacttagacaaaattcaccgtgttattacttgggccgctgaaggtctagaaaatgtctctgtttctcaagttgagttacgttctcagattcagttttatgatggtatcaaaactgccgatatccatgaaacactggttaaagctgctgcagacttaatatctggtgaaacacctgattatcagtatcttgctgctcgtcttgctgtctttaatttacgtaaaaaagcctatggtcaatttgagccaccggcattgtatgatcacgttaaacatttagttgaactcggtaaatatgaccgtcatcttctcgaagattacaccaaagaagagttcgaacagatggataagtttattgttcatcaacgtgatatgaatttctcttatgcagcagtgaaacagctagaaggtaaatattttgttcaaaaccgtattaccggtgatatttacgaaagtgcacaatttctctatgtgttagttgccgcttgcctattttcgcgttatccaaaagagacgcgtatggattatattgagcgcttttataacgcggtatccacatttaaaatctcactcccaacacctattatggcgggtgtaagaactccgacacgtcaatttagctcctgtgttctaattgagtgtgatgatagccttgattctatcaatgcgacctcaagtgctattgttaaatatgtatctcaacgtgcaggtattggaattaatgccggtcgtattcgtgcattaggtagtgctattcgtaatggtgaagcattccacaccggttgtatcccattctataagcacttccaaactgcggtaaaatcttgttcacaaggtggggtacgtggtggtgcagcaacgctattttatcctttatggcatttagaagttgaaagcctactggtattaaaaaataaccgtggtgttgaagataaccgtgtacgccatctcgattatggtgtgcagttaaacaaattaatgtatgaacgtttaatcaaaggtcaggatattacattatttagcccgtctgatgtgccgggcctctatgatgcattctttgctgatcaagacgaatttgaacgtttatatgtacaatatgagaaagataagagtattcgccaaaaacaagttaaagcggttgaattattctcactcatgatgcaagagcgtgcctctacaggtcgtatctatattcaaaatgttgaccactgtaatacacacagtccgtttgatccggcgattgcacctatccgtcaatcaaacttatgtttagaaatagcactaccaaccaaaccattaaatgatattaaagatccaaatggtgaaattgccctgtgtacactttcggcctttaatcttggggcgattgaaaatctagacgatttagaagagctagcacgtttagccgttcgcgcgttagatgctttgttagattaccaagattatccaattttagcagctaaacaaggtgctatgggtcgtcgtacactgggtattggtgtgatcaactttgcttattatctggctaaacacggtgttcgctactcagatggtagtgcaaacaacttaacacaccgtgcctttgaagctattcaatactatttattaaaagcatcaaatgaattagcaaaagagcaaggggcatgcccatggtttaatgaaaccacctatgcagaaggtatcttacctattgatacttataaaaaatcattagatgtactgactaatgaacctctgcattatgactgggaaagcttacgcaaagagatcaaacaatacggtttacgtaactcaacgctctctgcattgatgccatcagaaacatcatcacaaatatcaaatgcaaccaatggtatcgaaccacctcgtggttatatcagtattaaagcttctaaagatggcatcttacgtcaagtggttccagaatatgagcgcctaaaaggggcttatgaattactgtggcaaatgccaagtatcgaaggttatttgcagttagtcggtattatgcaaaagtttgtcgaccaagcgatttctgccaacactaactacgatcctactcgtttccctagtggtaaggttcctatgaaccagctgctaaaagatttgctgctcgcctataaatatggtgtgaaaacactctattatcacaatacccgtgatggtgcagaagatgtacaaggtgatctggaagaagtcgttgaaacggcagattcagattgtgaaggcggcgcgtgtaaaatttaattgaggaagctatgtcttataccactttttcacaagttagaaatgatcagcttcaggagcccatgttttttgggcaacctgttaacgtagcgcgttatgatcagcaaaagtaccctatttttgaaaaactaattgaaaagcaactctctttcttctggcgtccagaagaagttgatgtttctcgtgatcgtattgactacaatgcgcttcccgatcacgaaaaacacatttttattagtaatttaaaatatcaaactctgcttgattcgatccaaggtagaagccctaacgtggcatttttacctttaatttcgattccagaattagaaacttgggtagaaacatggtcgttctctgaaaccatccattcacgctcttatacccatattattcgtaatatcgtcaacgatccgtcggtcgtttttgatgatattgttgaaaatgaagagattttaaaacgtgctcgtgatatctcatcttattatgatgagttaatcaatttaactaacctttaccatatgtttggtgaaggtacgcatcaaataaaaggtaaaactgttgaagttactttacgtaagctcaaaaaacagctttacctatgcttaatgagtgttaatgctttagaagcgattcgtttctatgtcagctttgcctgttcatttgcctttgcagagcgcgaattgatggaaggtaacgctaaaatcattaaattgattgcccgtgatgaagcattacacttaactggcacacagcatatgctcaatttactgcgttcaggtcaagatgatcctgaaatggccgaaattgccgcagaatgcgaacaagaatgttatgacctatttgttgaagcagcagagcaagaaaaagagtgggcagaatacctattctcagaaggctctatgatcggtttaaataaagagatcctttgccaatatgttgaatatattactaatattcgtatgcaggcagtaggacttaaattgccgtttaaagcacgttcaaaccctattccatggattaatgcttggttagtatctgataatgtgcaagttgcaccacaagaagttgaagtaagctcatatctagtaggtcaaatcgactcacaagtagatactgatgatttaagtaacttcgaactgtaaaacagagaactagcgctatacattatggcatctcataaagtgaccctgcaccagcagggtctatcaaccgcattagaatttagctctgaaacgcatccttccttgttggagacgttagagcgcagcaaaattcaaatcgaatatcaatgccgagaaggttattgtggctcttgccgattacgcttagtaaaaggcaaagtatgttatcgcaatgagccattggcatttattcaagctgatgaaattttaccttgtagctgtcaccctgtgagtgatatcgaaatcgagatctgcacaaagtaaaactattgactataatgatcactgttttcttatattgttctttttctaacacaaatgcgtatttttaactaaagttaaataacagagttataaaaaggatcgttactatgaaactaaaaactattttaccgatttgtgccgcctctttctctttactgctattagcaggttgttcatcgccacaaaaaattgaaaccgtcgatgggcaaactattttgaccacagataaacctcaagaagatgagtctaccggattaattatttataaagatgctgaaaccggtgcaatcaaacaaattaatcgtgatcaaataagaagaatggttgagcttgatgattaattaatctttttttgtcattcaacaaccaaagacatgttaaatagcgccaacattttgttggcgtttttttatatcccctttattttgtaaacaaaacattacaccaatcgtaattaaaatttgacagaaatttaccattcttataccctacttttaactaggtaaaatagtttggaaaaacgaggactttgtgaaaaatcgcactataggcagtgtatttattgttgcaggaacaacaattggtgcaggaatgttggcaatgccacttgctgctgtgggtattggctttagtaccatggtgttattgctggtgggcttatggctattaatgagttacaccgcgcttttattagtggaagtctatcaatacaacgatccccatacaggccttggctctattgcgaaacgttatctgggtattggaggacaagtcgttacaggtttagctttgctacttcttatgtatgctttaacaacggcttatatcagtggtgcgggtgaattattagcttcgactttatcttcttggattggtcataagataaccatcacacaaggtatcattatctttacagttattggtggtgcggtagtcggtattggtaccacttctgtggatatgattaaccgcttactctttacagcaaaagttattttcttaatttttatgctggtagtcatgttaccccatgtggaaaaagtcaacttaacctctatgcctatcgctaaggggctcgttctttctgcgatcccggttatttttacctcttttggtttccacggtagtgtacccagtattgtcagttacatggatggcaatatcaaaaaactacgcctaatatttatcgtaggtagcgcaatccctcttattgcttatattttatggcaattagcaacattaggagctattcccaccaccacctttatggggattttagcccaagaatctggcttaaatggtctactcaccgccatccgtgatgtggttgctacaccgcgagtcaatattgctgtcaaccttttcgcagcccttgcactcgccacctctttcttaggcgtagcattaggattatttgattatctagctgatttgtttaaacgcagtaatcgcgcatctggtcgttttcaatctggtttattaacctttgttccaccgctattctgtgcgttatttttccctaactttgtgcaagccttagcctatgccgcaattgctttatctattctcgcactattattaccggcactactggtgtggaaagtaagacaacaaaagcagactacagagcattataaagttaaaggcggtaagccagccttagctattgtatttatctgcgggttagtggtgattggtattcaaatagcgattacctttaatatattgccacaagtgggttaatcaccattagctgataaaaatcaaataaaaagcaggtgttaattgtaacacctgctaaaaataaataactaaacgggaaaaacctaatgttcccgttattgatattagaaacttaaaccagctcctacatagaaaccatcagcaagtttattgttactgtgattatgcgcgttttcaatttcaatcacccgataacccgcattaacatgaagtggtttaaataccgtgtatttagcaccaacatcagcttcataataggatttacttcctgatgttaatccttccggcgaagcataagcttcaccataaacactcagtgaaggtaaaacacgccaattaagtccaacaccaccagctaatgccgcgccgtcatcaccatttttgggggagaggtaaagtgctttaccaccaacacttgctgagaatgggccaagaggtaacgcaaattttgcacctaaactacctaattgaccatcgtgatcactacgtgcccaattaccgttaaaagaaagtccagaatcggcatcacctaaacctgcttgtacatcggtataatgtttacccgcttgcacattcatcgatatggcattggcattagcagaaataagcaatgcgctcattgctcctaataataaaaactttttcattatgattaccccagcaaataattttcccaacttataattatacagcaaatttattaaacaattttactgagaattgaaagtcaatgtttagatttttcaatctatgtaaataagttacatctatcaatactatcggtccaatgggttttattaataattttaatcttgctaaagtggaattacagtaaaatttaaccataataaatataaggctgttcgcttcgttttattcacccatgctattttttaatgttcactattccacaaattggagaagatgtgatggaaaagaaaaagctcacaacggcggctggtgcaccagttgtagataataataatgtaataacagcaggacctcgtggcccaatgttactacaagatgtctggtttttagaaaaactcgcccattttgatcgtgaagttattcctgaaagacgtatgcacgcaaaaggctctggtgcctttggtacatttacggtcactcacgatattacgaaatatactcgagctaaaattttctctgaagtgggtaaaaaaacagaaatgtttgctcgtttttcaacagtggcgggtgaacgtggtgcagctgatgctgagcgcgatattcgtggatttgccttaaaattttatacagaagaaggtaactgggatatggtgggtaataatactcctgtattctatctacgtgatccccttaaattccctgatcttaaccatatcgtaaaacgtgaccctcgcactaatatgcgtaatatggcttataaatgggatttcttttctcatttaccagaatctctacaccaattaactattgatatgagcgatcgtggtttacctttaagctatcgctttgtgcatggttttggtagccacacttatagctttatcaataaagataatgaacgtttctgggttaaattccatttccgttgccaacaaggcatcaagaacttaatggatgatgaagcggaagctctagtaggtaaagatagagaaagctctcagcgtgatctttttgaagccattgaacgtggtgattatccgcgttggaagttacaaattcagatcatgccagaaaaagaggcatcaactgtgccttataacccatttgatttaaccaaagtttggccacatgctgattatccgctcatggatgtcggttactttgagttaaaccgtaatccagataactacttctctgatgttgaacaagctgcatttagccctgcgaatattgttccaggtattagtttctcaccagataagatgttacaaggtcgtctattctcttatggtgatgcgcatcgttaccgtttaggcgttaatcatcatcaaatccctgttaatgcaccaaaatgcccattccataattatcatcgtgatggtgctatgcgtgttgacggtaatagtggtaatggtattacttatgagccaaatagtggcggtgtgttccaagagcaacctgactttaaagagccaccactttctattgaaggtgcagccgatcactggaaccatcgtgaagatgaagattatttcagccaacctcgtgcactgtatgagctattaagcgatgacgaacatcaacgtatgtttgcgcgtattgcgggcgaattatcacaagcaagtaaagaaacacaacaacgtcaaatcgacttatttaccaaagttcatcctgaatatggcgctggtgttgaaaaagcgattaaagtgttagaagggaaagacgctaaataacctgataacaagaagccctgtgagcaactcggcaaaataataaggcgcctgtagtttgggcgcctttcttaaagtcgttcgataaaatcgcaatatcaatttacttgttgccctttcacccactgttgcacttgtttacgagagattttgatccctccattctttagctgttctggtaatagtaaacaagcgatgggacgttgaaagcctgctaaacgcgtatgataccattgtggtaattgattaattgtctcaatatcagtatcaacaacagcaacgggacgttgaccaaattcaatatcgtcaatcgggacaataaatgtttggcgaacattcgggtgactatttagcaccttttcaatatcttctggctgtataccttcacccgcactaaaaaacagattatctaatcgccctaaaatgcaccattccccctctttaaaacaacctctatcccgtgttgcataccaatcatcctgagtctgtgataacggctttaattgaccatcaaaccaatatcctaatgcaacactatcagatttgatctggatttcattatccactaatctgaccgctttaccctttaatggcgtaccaactcccgctttaccatctgcgcgttttgcacaaacagtagaggccatttcagtcatgccataaccacaccaacactgaatacctttactttccgcacattgggttaattcagttgggatcatcgctccccctaataaaacagcttttaatgtgatgggctgcgaactatcctgttgtgtattttgtaataaacgccaaagttgcgttggcactaaagaagcatgagtacagccttgcaaagcagcaataaaggggtgcatattacgcactaccaaggtagcgcctcgtaataaccaacgccaaagaattccttgcccagatacatgaaagagaggtaaagacaataaccaactgtcgcttttttcaaagggtatcaattcaagaacaccttctgcactacaaagatgagcttgaaaagtatgcacagcggctttaggtagacctgatgatccagaggttaagatcagtgttgccatacgagaagatgcccatgcaacacctgccatgttatttttatcttgatgtgatttgttattgaattcgacacctgaaagatcgagtaacctcgcatctaactcaagtgttgatccacttaaatcagcataaaaatcgatgtttaaatggggtaataaatcatcaagtagagacttagggagctgaggatctaacggtaatacttttgcaccgcattgaaaaacagcaagtagagtaaaaacaacatgaatatgatttttaccacgtagcaacacggtacttttagtattaacaccctgttttgctaaatggttcgccaatcgattgatatgacaacttaattgttgccatgttataggtgaatcaccggatatgatggccgtttcatttgggttaagctgcgcccagtgatgccacggccattgtgtaaaattaactactgttgccatactgtcttaagctgttcaagcgtaataagcggaatatctacatctggccaacaacgaataagttgttgtttgataagatcaacggtatctaaaccgggaatagaatctggtgttaaccactgagctactcttgccagttgtgtcaatccaaagctactttcaatactcgagctaataatcgcctctagacctaaagcatgcgcttgttcaacgatagattggcaacgagcaagacttcctactagcgtaggcttgataacaatcgccgtaacaccctcttgagctttcacttcaaaaccttcatcacgcacagtctcatcccaagcaatattgatacctgttgcttgtgaaaaggcgagtgactcttctggggttttgcatggctcttctaaaaatgcaatgcggtcgcgccattgtgggttcacgtacttggcaaaaccttctgctttagctggcgtccaactgcgattggcatcaagccttagttttaagtcggggatcgcctctagtaataagttgacgacaataccatctcgtaccgcttcatacagaccgaccttaactttagcaactttctccccgctcatttcattaagacttaaaattaagtcatcaggatcaccgttgcataaaggtgcggcacgataattggcttcttctggtaaagtgccttcaagctctgctaatgcgcaactaataccaaaagcgacacttggcaattcactgtcagtaggattttcacctagacaccaagctgctagccaagattgtgcggcatcttgtgcttgttctaacgtttcatggctaaactcaggaagaggtgaaatttcaccccaaccttgtttgccattttgctctaaacagacaagaaaaccatcacgcgtttttaatctttggtagcgcagaacaacacctgcctccattggcaggctgaatgaatagagtttggcgtttcgcattatgggttacgtttaaatttagtgaaatcaggatgacgtttttcattaaaagcattacgtccttcttgaccttcatctgtcatataaaacagcatggttgcattaccagccaattcttgcagacccgcttgaccatcacagtcagcatttaatgctgctttcaagcaacgtagtgccattgggctattttctagcatttcacgacaccaacgtaccgtttctttttcaagagaagcataaggaacaacggtatttaccaatcccatatctaatgcttcttgcgcattatattggcggcataagaaccagatttcgcgagctttcttctgcccgacaatacgtgccatataagaagcaccccatccaccatcaaatgagcctactttaggaccagtttgaccaaaaatggcattgtctgcagcaatggttaaatcacacatcatatgtaagacatgaccaccaccaatggagtagccagccaccatagcaacaacaggtttaggacaagtacgaatttggcgttggaaatctaatacgtttaagtggtgagtgccactttcatcacggtatccaccgtagtcaccccggatcttttggtcaccaccggcacaaaacgctttttcgcctgcaccagtaagaataatagtaccaattgagtcatcgtaacgtgcatcggctaatgcttggatcatctctttcacagtcaaaggacggaaagcattacgcacttgcgggcggttaatcgtaattttggcaatgccatcgacagatttgtggtagaggatatcttcaaaaccttcagaacaatcctgccattcaatcggtgcatatagcttttcttcgctcgggtaaagcataattaggttcctttaaccaaagagggataatacatggtttatcaccgcagcataagcatcaggctgtgcctgatgggcattatgaccagcttgcgggatagtcgttaatggcagcgaatattgctgcgctattgattgaaattttttatcttgctcaccacacaaccaaataaagggtaaggtgagttgttgtaattctgcaactaaccaaggctgatggcctaaagagagtgtttctaaactttccgcaatacaaaaacctgcattactactgcgtttttcaactaataactgacgcatttcatcgcttaaatcagcaaagacaggctgttgataccattgcgttaatacatcattaataggttcattgcgaaaacgcgcggcccaacgtttatcatgtgcaatacggttttgtctttctattgcatcatataaacctgggtttcccccttcaacaatcaatcccattaatcccgatgtttcaccaaaacatgcgtgatacatcgcaattctgccacctaaagagtaaccaatcagccagtaatgattaatatcgtattcttttaaagtgtcatggagtaatgcactcatctcgacaaaattatttaccccaatagaggcagagttaccatgacggggcaaatcaatcacgagtgagggatattcatggcaagccttaatgacggtctcccactcatgactgtctcctaatagtccatgcaaccaaactaaccatggcccttcgttatgcgtgttatattgcctacaagctaaagtcataagcggttacctgttttaccaactgatttaaggtttcagcaccctcagtttcattgacaatcaattcaattaatgttgttttggcttccccctgccaacatgcagtcactgtagtaaacagatcatcccaacagtttggtgcaacataatctaaaccaaacatggcagcagcatgtttaaaatttaaagcatggggcatacagtaaaaacgctcccgctctgccataggcgtcggtaacatagagaatatctgcccaccattgttattgacgataatcaccacatttggggcatagacttgttgatgtagtgccaaactatttaaatcatataatgccgataaatcacccaagatagttaacgtcggtttttgagtggctcgatgaacacctgctgaggttgaaagtaatccatcaatgccactagcaccacgattactcataacaggatagccctgtggcaattgtgcaaaagcatcaattaagcgcacaattaaactattgccaacaaaaagctggccattgtgaggaagtaaatgatctaactgatgagcaacttgtgcttcaccaaaatagtctgttacttcagtaacatgttgataagtttgtgtagcaatatgacttaatgacaacgcccaaggtaaattatcaatagcaggatgtgccgttaaccattgactcggggataaggtaaatttctccccttgatgatgccccggatctaaacgtcccggaatagcatcaatcacccaatacatttgcggtgagcaattcgcttgccattgtaataagcgtttgcctgttaaactagagccaaattggatcactatttctgcttggtttaattcagccttcacttgtggattatttagccataaatcagcacaaggtagtggttgtccagtttgtgataacacatcacctaacagaggccatcccaattttgaggcccatttggcaacggcaatcccctctttcgcactaatacgtccagcaataacgaccccttttttctgacgtagtcgatcccattgagggtgtgtagtcacagagggagaaagcgtttcttgtaaccaaggtttatcactttgccaccactttcctaatgcttgtgtccatggtgtgtcatgctctatatcatcaccatataatggctctgcaaaagggcagtttacatgcaaagcaccatgcacaagattattcatggcattatctaatgtagaaaccagccaacgagcagaaatatctgctgtagggcgtggtaaagagagtgtttctgagggatggctggcaaaaataccttgttggcgtatagcctgattggcgccacaattaatcagctcaggcggtctatctgccgtgagaaagatcacccgttcaccagtaagtcccgcttcaattaaagcggggtataagtttgccactgcggtacctgaggtgacaatcactgcaacaggctgttgagtggcttttgccaaacctaatgctaagtgacctaaaccacgctcatcgaaatgcgtatgacaaataagtttatgattggcggctgccgcaagcgttaaaggcgttgaacgtgatccgggtgcgatacagatatgacgtaaaccatgacgagtcaaagtttccagtataactttagcccattggcgattaaacgaactattagacattgatcatcccaataacgaaaacctgcaatgactattataatatctgttcctaaatacttttccttagcctagttcaatgaacagaagttttcgttaaataaatcgtgaaaaagaactctgataagagtgtattatttaagctaaagtacttatctttttaggcttaatttttatcgttaacaaaaagatagcaataacactagctagcacaagaataacattaatttattaacaagatgcagtgacgagttgaaagtagcactaaatggcatcctaatcagtactacttatcaacacccagtttatatattatgagagccattggataaactgcaaagaattcaacactctttttctaataaagtgcgtaaacctgctgctttattttcaatttcagcccactcttgcaaaggatcagatcccgcaaccacccctgcgccagcataaagcgttaatgcatcatcatgcaattcaccgcaacgcaggctaaccgcaaattcggcatgaggcaaagacaaatagcccgcagagccagcataccaacggcgttcaaaaggttcatgttgacgaataaaagtgcgcgcaatagagcgcggtaagccacaaacagccgcggtaggttgtaaacgctgtaaacaatccacatcatcagcatggataagtttaccgtggatatagcgacgcagatgttgcactttacgtaagcggatcacatctgctgatgatacatcaatcccttctatcccaccttgtaatcgctgacaaatatcatcaactaccaccagattttcatgttgattttttttatcgttcattagccaatcagcaaatgctatggcctgttgttcattatcagaacttgccacagtgcccgccaacgcttcggtataaagcacaaattcatcgcgtttatacaatctttctggtgatgagcccataaaagcatcagtaggtgaaaaagccagcatataatgatagcaatgatgattaacatctcgacttgctttcataaattgaatagcttttaacggattatctaagcttaagcaggttgcccgtgcaggtactactttttcaaatacgccttgattgatttcatctaaagcaatattaagatagtcagtccattgctgttgcgttaacgagtgctctacagatgttactttgacagataaaggtgcaatattcagtgcatttttaagtgagcgaataaaagcaagcgcactttgcttatcttcttctgccaataaattaatatggatcgacagttgttgctgacgtcttatttcaatacgaggtaaaaaaaggtaagcatcatcccccctttctttatcaatacgccctggaataatggtatcccacgcgtttaatccccaaatacgcacatcatcagcatgcaatgaatgccgatgtgttgctaaaaatcgatgagcatcacggatatgattaaagcacttaacttgtccacaaacggctacttcttcgctttcatcacgatgttgccaataaaattgcgggtaatacgtttgtgctgctagccatgaaagtaaggaaaatgacacctctgatggcaagataactttcaaatgtaaaagatcatcttgtgctgtcagatttatatttttaactttttcgtacagtgtcgaaaacacaggattaaccttttccactctaaatacctactactaatgaaaagaaagattatacgtctctataagaattatcaaagtgctgattaattataacctttgtcatttatcaaacttttgttgttttcatgttacaaaggagaagcattgaccagataatcgcaaatggaaaacagatcacttctaaattatgccttaatcataacaaataattatacataagagaggttatatggatacaaccacccttgatcatatagataaagtgattgaacaataccaacttcccgaagtcactcttagcttaattctaggtaaaaatatcgatcatggacgtagtgcgggtatttttacaccttatgatcttaataaaatcaaatcttatattgataaagtattaaaattaccttatcaaaaagacactattattgaattattaggctacgaagatattaacatttcccaaatatcagctgaaactattcaaaccctcttcttaaatatgagaacacatgcctttgaatggcaaaaaattgaatactcagtaaaacagcaagctattgatttagagatcaccggtagagaaatcacgagtacaggtgagcaactattggcatttattaataaaatgccaattataaaaaaaataaataggaaaattgaagatatcacaccagaagaactcagttcaataaaatattcaacacaagataaaaaagtgtctaagcaacttgttgccattttagaaagcatgaaaaatgatattaatgagcaatataataataccttaaaaataaaaaacatgatttatgattttagaatagaaattgtgggaggtgaaaatagtaaaggtaatatatgtcattcaatttattatgatatcattaataaaaagaaatatattaatgatttttttgataatagtgatgactcactaaatgaacagagaattttattagaaaatgaaattgaaatattaaaaaaagagtatcaacacttcgtgaaactcgcctttacggggttagcattcggtattattggtgtgatcattactggagggatctttggttcaaaagctgaaaaaatccgtaaaaaaagaaatgaaacaatagagaaactacataatatcaataaaggaataaaacaacaatcaactatttctgagtgtttacaacgttttcaagtcgatttagacgaaatagaacaatatattgaagatgctgatatgtctgtggagcatcttctttatatgtggcaaacaattttaactgaaattaatgcttcattaattaattttaaaaaaattgataatgcaatggagttaattagatttagtatttatttagaaaaaatcattgcaccttggtatatggtggtcggttactcaaaggaaatgatggcggtatttgatgaagctttatcctctttttattcatctaaataacaaaaggaaatgttatgaatagcgtaacttcgcaattacaggaatttgattgcaatcaatttttccatactattaaatcaattagaaaaataacttctgaactatttgaacatgataatatcttaaatcataatcttattaccatatcaataaacaataataaaatttatgatgaaataattattttctctattctgctaaaaagccggctaaaccagaaattgttaacagggatatttaaaaatattaatgaaattaatcatgcaatggctgatagagagttaacacagcaattatcagaaaaactgctccaagagaaaatgtttattgagcagttatttaaagatgaattaactgaatctatagaaattatagaaaagcacatcagttttattaatgataaaaaacagctcttaacaaccaccactattattagtgaaatagataaattaattagaaataaagaagaaatatctattgaaatcaatgagaaaatagccaagcaaaagttatcgattaatgaaattaaagaacaactcgatataattactaaaagtgaagatattatttataataaaaatatcctcgatttttttacctctcacctgccaagtaaacagacaatttctaaactgcagttggcttcttcagaaaaagatattctctctgtttttatcgatctgctaaagcaattttttacccatctggagaaagggttttcttaccaaaaactggtagagacacgtcatactcttattgataactatttgatacagataaaaaatctaaccaaactagaacagaaaaaacaagctctcttatttaccctaagtcgttattatgcagtcacagaaatcaatcaatatattgatatgttaaatcaacaattatcgctattagagcagtattggcatacattaatagagcaactgatacaattaaaacgcaatctttccgaggcaaaaaccgtgctctcacctcatcttgtattccttaatcacttttcacaccattatcaataatattttcactagccagacatcataacccccttaaaacagggggtatgattggtatagtagatatagaaccgttcaatataatctggtgcattcactcggtataagcaacaacatcataaataaattcaaagtccataatggtatcgactttatgaataaggtcatcttcaggaacaagtttatcaagggggattgttgcgaacaaaaattgctgggggaaggtattcttttaacatatcggttagctcactatttgtactaacctgagtagatcaaacttctaactaaaagcgaggacttttccgtagtttgaagagcctgataaaatatcaggctctttatcataacaacgggcagataaaaattaatttatcgcaggtgcaatgattgcaaaacgtgtcagctcaatcaatggttgtggccatacacctaatacaatcacgataatggcgcaaactaaagtaattaatgttgccatattttgtgatgtggtcgtaaccgctggtgcattatcgttatctggtttgcgtaagaaaacgatagctgcagcacgtagatagtagaataaacctatcgcactacctaacactaccatgcctgttaaccaccacaaacttgaatcaataccagcaagaataacatacagtttaccaataaagcctaatgttattggcacccctgccagtgatagcatcattaatgacatcacgacggcagcaacaggacgacgccagaaaagcccacgataatcttcaagagactctaattcacctttattgtacgggctagaagccacagcaatcgcaccaaatgcacctaaacttgcaaagagataacctgctaaataaatctcagcggtttcttgtgccagtatagggctatattgcaagacaattaatgcaaccagtaaataaccaaggtgagagacagaagagtaaccgagtaaacgttttacgttcttctgagtcagcgccatgatattaccaaacaggatagaggcaatagccataaagcctaagatcatgcgtaatgtttcgctatccgccgccggtgcttcaaggaataagcgcatcactaccgcaaatataccaatcttgctcgctgtcgctaaaaatgcacctgttggtgctggtgcaccttggtatacatccggtgtccataattggaatgggaataaagagagcttaaaaccaattcccactaacatcatgcctaacccagcaagtactaatggtttatggatattgctatcacttaaactttgccccatcgccgtaaaggagagatttcctgcttcagcataaagtagtgccataccaaataacaagaaagaagaggccgccgcagaaagcagcatatatttaatgctcgcttccagtgaaggacgttgttggaaagcataaccaatcagaccaaataacggcaatgttagtaactcaataccaataaacattgacgccaagtggtgcgcagaagagagtaaaataccgccaatgacagcaatcgccaccagcatataaaactcttctttattatcttgatagccttccaaccaaggataagcaaaagcaaccgtacctaaaccagcaataatagttaatgccgtgaaaaagctggaataaccatctacatggtagagggtggtcacatcaactacgcctaatgcattaacgtagtaaagtgatccgagagcgatgataaaaccagttgctgtcaaggtggcaatagtaaagtgatcgcgtcgccacgcaatggacagcatcaccaccaccaccgtcaagatgacgactaacagcggtagcattgcgatcaattgttcaggagttattgtcatggcgaattacagccttactgttgaaagagaagcggaataccaagtctggagattttccattgctgatatcgaagtatctaatactggttgtgggaagaagcccaaaataaccaataaaaccaccaagataaacaggatcaaaaattctctcagatttaaccctttataggttctttctgctgttttcggtgaaccatagtaagcctgttgcatcatccacaaagcgtagacagaagcaaaaactaacccaaagaccgaaataatagtgatcagcttaaagtggccataagtaccaaataggatcataaactcaccaacaaagttacctgttcctggcatacctaaagaggcaaccgcaaagaacagtgaaaatgctggtaagaaacggatgcttttccacaatccacccatttgattcatatcacgcgtacctaaacgctcatacagcatgccacacatgataaacagaccggcagcagacaaaccattggtgatcatttgaataatcgcaccttggtaagccaaaacagagccagcataaatcgcaatcacgataaagcccatgtgagaaatactactgtaagcggccagacgtttaatatccgtttgacggaatgctaacagtgcagcgtagaatacggtgattaagcctagccacatcgcaacaggtgccagtaatgcagacgcttctgggaataacggtaagttaaaacgtaataaaccgtaagcggctgtttttagcaaaatacctgataagtcaacagagcccgccgttggtgcttctgcatgtgcatcagctagccagccatgaacggggacaattggcatttttactgcgaatgcagcaaagaagccaagcatcagaataaattgcagttcactacctaataaggtgtgcgcttgtagtaaggtgtcataattaaacgtccaaatacctgttttgctgtaaaaagcgacagctaaaccgataatggccagcaacattaacaagccactcgcctgtgtataaataaagaacttagttgctgcactaacatgtttctcatcactacttcctttatgtccccaaagagagataaggaaatacattgggatcaacatcatttcccaaaagaagaagaataagaacaagtcagtcgctaagaatacccccataacacctgctaagatccacagcaggttgaaatggaaagccccttgtgatggttgattttcgctccatgaagagagcaccgctaaaatacctaaaatagcagttaataccaccatcaataatgacatgccatcaagtgcaaactgaatattaatccccaaagcagggatccacggtacaaagtaaaactctgtccagcgaggtgctccatcaacactaatcagttgatagtcaccttgcaaccacagttgcacagaaataacgagtgttaatcccatcgtcagcaacgcaacccagcgaggaacttgcgagccgattcgttcagcctgccaacttagcaggccaccgatgaagggaataagtattagccagggtaataacatggcgcaatgtgtcccttaattaaaccagaagcagcagagcgataaccagcactgcacctaaaccgagagaagccgcataccaacgcgctaatccgttttcactgaaactcaagcctttattggcgcctttaaagagacaaccaaagagattaaagaattggttaacaggatcattttggataagccatgccgcacctttataaggtttgacaaacagcacctcatacagtgcatcaaatccccatgcgtggaaccaccatgttgagaagaaacgccctgttttggtatttgccacctgagaaacaagttgacgctgtttcaggtataaccatgctgcaatggcaacgcctacaatcgctaccacaccagaaaggatttctaatacatacttaccttcatgagtaacggtgctttctgggaaaacatcgcctaacggttgggtaattaacgccccaataaaggttgataacaacgctaataccgctaatgggaaagtatgagtgaagcctttaacttggtgtgcttcggttttggtttcaccatggaatacgatgaaaattaaacggaaggtataaagtgacgtaaagaatgcgccaattaaacctgctaacattaaattgaaatgtccgtttgcgtacgcaccccataagatttcatctttactgaagaaccctgctgttaacagtggtaatgctgctaaagcacctccaccaattaaaaagcatgcataaacaaatgggatcttcttacgtaacccgcccatcttaaagatattctgttcatgatggcaggcaataatcactgaacctgcagataagaacagtaatgctttaaagaatgcgtgagtcattaagtggaaaattgcgccatcccatgcttgagcacccaacgccaagaacatataaccaatttggctcatggttgagtaagcaagaatacgcttgatatcggtttgtactaaagccgcaaaacccgctaatactaatgtcactgcaccaacgataccgactaattctaagatatcaggtgccattaagaatagcgcatgactacgggcaactaagtacacaccagcggtaaccatggtggcggcgtggatcaacgcagaaacaggtgttggaccggccatcgcatccgctaaccaagtttgtaatggcagttgtgctgatttacctaccgcaccccctaagaccattaacattgcccagttaatgatgcttgatcctgcggtcagttgttcaggagccagtaccgccatttcgcggaaacttagcgtacctaattgatcaaacaggataaacataccgatagctaagaagacatcaccaatacgggtaacaataaatgctttcattgctgccgcgccattagctgggttgttatagtagaaaccaattaataagtaactacataaaccaaccccttcccaacccatatacatcagcatcatattatcagccaatactaaaacaaccatactcgcgataaataagttggtataagcaaagaagcgagaatatccttcttcaccacgcatataccaagatgcatacatatgaataagaaaaccaacgccagtgataacacctagcatggttaatgataggccatcaagcaccaacgtaaatgggatagtaaagttccccgctgacatccaagtccagagtgttaagacttctgtttcttgtccgtgagcaaagaaatctatccccacccaaagtgtcactaaagctgataaaccaacagcgcccgtgccaatccatgctgatacattttcagaccaacgaccacctgagaatgcgagcagtaaaaatcccagcagtggtagcacaaaggttaaatagagtatattcatccgcgcatctcactgactgtatcaatattgaggttttggcgatgacgatgaagttgtaataacaatgccaagccaatacttgcctctgccgctgccaaactgattgccagaatatacataatctgaccatctgtttgaccccaatagctaccaccaaccacaaaggctagcgcagctgaattaatcataatttcgagtccgatcaacataaataacaggttgcggcgaagtactaagcaagtaaaacctaacacaaatagtaccgcagccaagatcaaaccatgttgaagaggtatcattttggctcccctactttttcgttttcgacgagatcgtcatggctctgatcacgaccgatgtgataagcaacaattaatcctgacaataagagaacggaggctaactcaacagccagaatataaggcccaaataagctaataccgacttctttcgccccaataatctcgccactaatctcaccatgagtgacactactaattgcataaaccaatacaattaacagtaccagagacaaaatcgccggccctatccaaaatctaggctgtaaccattttctctcttgctcaacgaccgattttcctaagttaagcatcatcacaacgaatacgaatagcaccataatcgcgccggcgtaaacgatgatctctaaagcacctgcaaaataggcacctaacgagaagaacaccactgaaaggccaattaatgaaacaatcagatacagcagtgcgtgtaccggattggtatgcgttattactctcaaagtggcaaggattgaaatcagtcctgcaatatagaatgcaaattccatgaatatcgctccttacggtaacaggcttttgacatcgataggtttcgcttcatcatctgcttcacctttatctttgccattaatcgccatacctgttttacggtaaaagttatattcaggatatttaccaggccctgaaattaataaatcgtctttttcataaaccagatcttgacgcttaaattcacccatttcgaaatcaggggttaattgtagagccgttgttggacatgcttcttcacataagccacaaaagatacaacgcgaaaagttgatacggaaaaactcaggataccaacgaccatcttcatgttctgctttttgtaatgagatacaaccaacagggcacaccgctgcgcacaagttacaagcaacacaacgctcttcaccatcaggatcacgggtcaatacaatacgtccacgataacgcggtgcaacattgacaggttcttccgggtacatctgcgtttcgcgtttggcaaaggcgtgtaagccaatcatccaaatgctgcgtacctgggtgccgaaaccagtcactaactcttttaaagtcatggttcaatcaccccttattgagcgttgtagaggatcactgcagcagtgaccaacagattgattaaagttaacggtaagcagatcttccaaccaaaagccatcacttggtcataacgcggacgcggtaatgatgcacggatcagaataaacatcatcatgaagaatcctgttttcagtgcaaaccaaacgaatgacggtaagaaaggaccttgccaaccaccgaagaataacgtcactattaagccagaaacggcaacgataccgatatattcaccgacaaagaacagaccgaatttcataccggaatattcaatgtgataaccatcagccaactcttgctctgcttcgggttggtcaaaaggatgacggtgacaaacggcaacgccagcaatcgcaaaggtaataaagccaaagaattgtgggataatgttccacatatgggcttgcgaattgacaatatccgttaagttaaacgaacccgcttgtgccacaacacctaaaatagaaagtcctaagaaaacctcataactaactgtttgtgctgaagcacgcattgcacctaataacgaatatttattgttacttgaccagccagcaaataaaacggcatacaccgctaaacccgctaccatcaagaaaaataaaataccgatgtttaaatcagccacaacccaggttgagctaactggcacaatagcaaatgacaataataaggaagaaaaggcaatcactggtgctatggtaaagataaagcgatcagcaaattttgggatccagtcctctttaaagaacattttgatcatatccgcaattaactgtgctgaacctgcataacctacacggttaggcccataacggttttggaataatcccagtagacgacgctcccccatactcataaaagcaccacaagtgacaaccaccagcaagatcaccacggcttttaaaacagtgagtaaaatctctgtaacttcaggagataaccagctcattatgcaataccccgcagttgacgaaccgatacacccaccagtgatggcgaaatgccagccatccctaacggaaggccaatttgacctcgggttaagtgagcactgattttcacaggtaaggtgaattcacgaccttcgtaagtaaacatcgcttgttgaccttgagataatgctaatgcgatggcatcagattcactcacggttaaataagcgttgtccatacgttgttggatcacttgtgaacgttgcgataactcttcgctaccaaacagacgatagtaaggagctacaacccattgattttcaactaggttaaaggctggtggaatatcagtgaaataacctaatgtgttatcactgcattcgattaagcgtacacccggatcaccaaaacgtaagcttcccccgacttcagactggaacttattccatgcttgtggtgagttccaacccggtgcccatgcaaatggaatttgctggcgaggagccgttggactgttgtttccttccatagagaaagcaaatgggctatcgatatctttaggttgacgctgttcatgtactgaaacatttgccaacatggaagtacgaccactataacgatgcggttcacgggctaatttttgaccacgaatacggaatgatgcattaggtgccgcattcacaataccggcaaattgcggtagacgcgttgcacatagctcaatcacatgatctaactgcgtccagtcaagattaccttcatgccattgtgaatcaacagcacttagccaacgccagctttcatgcatcaccacttctttgttatagaaagaaggttcaaacacttggaagtaacgttgcgctctgccctcttgactcaccatagtgccatcactttcagcaaaggaggaagcaggtaacacaaggtgtgctttttccatgatctcagtttgctgatggtcaatcacaattaggtgatccactttagcaatcgcgtcatcaatgacgtcggcggcaaaatggcgatacaagtcgttttccatcacaatagcgctatctgcttgaccactacgcatcactttcaatgcgtcatccagtggtttcgctttcatcatcgccagccccatgctattggcatcatctgccacataagagagaccaacttcgctccccttggcttttaaggcaaaagcgatattagcagccgctttgataacctcttcgctacccgcatgactaccactaatgattaacggttttttcgcttgcgataaggcttgaacaatcatgtcaatctgtttattcaatgcttcatctaagccatcaaccgcaggggcttcaccattaatatgatgagcaatggcaaaacctaaacgcgcttgttcaaccaccggcgcacgataactccaagcggcaacatcatccagacgagtttcatcaacatgggtgacaaacagtggatatttcgcccgttgaccgatattcatgatggcagcaatttgccaatcagccactttttgtgcggctgccatctcacgtgctttaccttttacggcttgacgtactgacagtgccatacgagcacctgtctgtgttaagtcttcacctaacaccagtactgcgtcatagtcttcaatctcacggagagatggagtataaacgccacctttttgtaaaatatccagcattaaggtcaagcgagcctgctctgcagctgaaataccactatagaaattttcagcaccaaccacttcacgtaaagcaaagttgctttcaatactggctcgtggtgagccgataccgacaacacgttgccctttcttcagcatttctgcagcggcttgcgttgcttgtgctgcactgatttcaagccagttactgcctaaacgttttttaggttgacgaggtctactcgctaaattgacataaccgtagccaaaacgaccacgatcacaaaggaagtaacggtttactgtaccgttataacggttttcaatacggcgcaattcaccatagcgctcacctgggctgatattgcaacccatgctacaaccttggcaaatactaggtgcaaactgcatatcccacttacggttataacgtgatgagtgagttttgtcagtaaagacacccgttggacaaatctcaactaagttacctgagaattcgctctctaatgtgccatcttcaacccgtccaaagaacacgttgttatgtgcaccaaagacacccagatcagtgccatcagcataatctttgtagtaacgaacacagcggtaacaagcaatacagcggttcatttcatgagaaataaacggccctaactcttggtttctatgtgtacgcttagtaaagcgatagcgacgcatagtatgacctgtcataacggtcatatcttgaaggtggcagtttcccccttcttcacaaacaggacaatcgtgaggatggttagtcatataccattcaacaacgctttcgcggaattttttcgcttcttcgtcatcaatggagataaacgtgccatcagccgcaggtgtcatacaagacattaccaagcgaccgcgggtatcctcagcattttgatactgcttaaccgcacactggcggcaagcgccaacgcttcccagcgctgggtgccagcaaaaataaggaatatctaagcctaaattaagacaggcttctaacaggttatcagccccgttaacttcatattctttgccgtctacatgaatcgtagccatagtcagcatgcttcccaaaggcctgcattgcaggcgttaaacctagaatgtatcgtgaaaaactaccagcggcttttcagcaagttaggctgaataccacggataagattggcattggtatagtcttcttgaataatgccagcctcaaattcttcacggaaatatttgattgcgctttgtaaaggctctactgcccctggtgcgtgagcacagaatgtgtgccctgggcttaaagagcggcagaggtgctcaagagtctcaatatcaccaggacgaccttgacctttttctatcgcgcgtaagatttcgacactccatggcaagccatcacgacaaggtgtacaccagccacaagattcacgcgcaaagaactcttccaagttacgggttaatgaaaccatgttaatttcattatctaccgccatcgccaacgcagtacctaaacggctaccagctttggcgatcgtgccaaaatccatagggagatcgagatgatcttctgttaagaaatccgttcctgcaccaccgggttgccaagcttttaatttcagcccatcacgcatcccccccgcataatcttctaagatttcacgagctgtagtaccaaaaggtaattcccataagcctggatatttcacgcgaccagagaatcccattaatttagtacctgcatctggacttttaccggcgcttaaaccgatataccaatctttgccatgctcaataatcgcgggtacgttacacagcgtttcaacgttattcacgcaggtaggttttccccaagcaccggaggttgcagggaatggcggtttcgagcgagggttagcacgacgaccttccagtgagttgatcagtgctgtttcttcaccacagatataacgacctgctcctgtgtgaacaaatagctcaaaatcgataccagagccgaagatatttttgcctaaaaaacccgctgctttggcttcttcaatagcatgacgcaggtgcttagccgcttcaatatattcaccacgtaggaaaatataaccacgataagctttcagtgcatgcgcaccgataatcatcccttcgattaacagatgtggcagttcttccattaacaggcggtctttataggttcccggctccatttcatctgcattacaaaggatgtaacggatattcatactttcatcttttggcatcaggctccatttcaagcctgttgagaatccagcaccaccacgtccttttaagcctgcatctttaacttcagaggtcacctcatcgggtgccatgctttttaatgctttttctgccgctttataaccgttttttgcacggtattcatccagccatactggctgacgatcatcacgtaagcgccacgttagcggatgcgtttctgcgctacgaataatcggttttgctcctgaaattgctgtcatggatactgctccagtaacgtttcaatctcttcaggtttaacaaaactgtgagtatcgtcatctaccatcatagtaggacctttgtcacagttacctaaacaacaggttggcagtaaggtaaaacgaccatctggtgttgtttggccaggaaggatattgaggtgcttctcaatagctgcctgaatgccttgataacctgtaatatggcaaaccacactgtcacaaaaacgaataatgtgacggccgacgggttggcggaaaatttgactataaaaggttgctaccccttctacatcgctagccggtataccaagcacatcggcaatagcatagatagcaccgtcttcaacccaacctcgatttttttgcactattttcagcgcttcaatcgatgcagcacggggatcttcatagtgatgtttttcttgttcaatttcagcacgctcttcttgcgttaaaacaaacgtgtttttctttgaatgagttacatcaacgatttcaatcttcgcggcatcctctttatggtttaattcattttgcatgattaacgatccacatccgacattacaaaatcgatacttcccagatagacaatcaagtcagaaaccagactaccgcggataaccgctgggatttgttgcaggtgagcaaaacttggcgtacgaatacgcgtacgatagctcatcgtgctgccatcactggttaaataatagctgttgatccctttagtggcttccaccatctggaatgattcattcgcaggcataacagggccccatgaaacctgtaagaagtggttaatcatggtttcaatatgctgtaatgtgcgctcttttggtggcggagtcgtcagtggatggtcggctttaaatggccctgctggcatatttttataacactgctcgagaatacgtaagctttgacgtaattcttcgactttcagcatgacacgatcgtaacagtcaccattgcttgccactggaatttcaaactcaaagttttcataccctgagtatggacgccatttacgcacgtcaaactcaacccctgtagcacgaagcccggcacccgttaccccccaatctaacgcttctttagcgttataagaggcaacaccaatggtacggccttttaaaatgctgttttgcaaggcggctttaacgtaagaatcaagacgttttggcatccaatctaagaattcacgtagtaagcgttcccacccttttggtaaatcgtgggcaacaccaccgatacggaaccatgccggatgcatacggaaaccggtgattgcttccacaatatcgtaaactttttgacgatcagtaaaggcaaagaataccggtgtcatcgcaccaacatcttggataaaggtactgatatacagtaaatggctattaatacgaaatagctcagacagcatgacacgaatgactttaacgcgctcaggtacttcaataccggcaagcttttccaccgccagtacataaggcatttcgttaacacaaccaccaaggtattcaattcggtcggtataaggaatataactatgccatgattgacgctcgcccattttctctgcaccacgatggtgataaccaacatcaggtacacagttgacgatttcttcgccatcaagttgcaaaataatacggaatgcaccgtgagaagatgggtgattaggaccgaggtttaagaacataaagtcctcattctcagtaccgcgtttcattccccactcttctggtttaaaggtcagtgattccatttccagatcctctttctgcttagtcagcacataaggatcaaattctgtcgcacgagcgggataatctttacgcagtggatgaccttcccaattcggcaacatcataatacggcgtagattagggtgtccgttaaagacgatcccaaacatatcccacacttcacgctcataccaattcgagttcggaaagatagaagtgagagtcggtagattaagatctttttcacttaatgcgactttcagcatgatatctttattacgatcgagtgatatcagatgatagaaaacggaaaaatcagctgccggcaagccttgacgatgcgtgcggacacgctcatcaacgccatgcaagtcgtacagcatgacatatggttttggtaaagatttgaggtattgcataacctcaataagttgttcccgcttaacccataccactggcatgccggtacgagtcggctggaatgtaaacgcatctggcccaaatttctgacgcagttcgttaaccacctgatcatcaatatgatcgctggtttcccacgctggccgtgcgctattttgcgctatctgatcggtcatttctattcaccacaactttgatcagggttactatgatcgcaacacattgctctggttacgtcttaggcaaaagcctttaaatttcgtctggagtacgcagattttttactgcgatccgctcaccgtgttttctttctcgttctgactgcatattggcacggtaaacgccttggtcgcccaccacccaagataatgggcgacgttctttaccaatggactcttgtaataacatcaatgcttgcatataagcttctggacgaggtgggcatcctgggatatacacatcaacaggaatgaatttatcgacaccttgcactaccgaatagatgtcatacataccaccagagttagcacaagctcccatggaaataacccacttaggctctaacatctgatcgtataaacgctgaataacgggcgccatctttgtaaagcaggttcctgcaaccaccataaagtcagcttgacgaggggaagcacgtaatacttcagaaccaaaacgcgctacgtcatggaccgcagtaaatgacgtcaccatttcaacgtaacaacaggaaagaccaaaattatatggccataaagagttttttctgccccagttcacaacgtcatgtaacgcatgttccagttttcccatatacacgctgcgatgaacgtgagcatctaacgggtcactgacaatttcctgtgattgcaggggataacggtcattctcaccgttcggatctatgcgggtgagcgtataatccatttttaatgcctcgcttattactgctgcggatgtttgccgctggttaatctgacatggcttttacccgcggtttcacggcgagagcgaactggtgtccaatttaatgcaccaatacgaaccaaatagaataatccagctaataaaattgcgataaagacagctgcttcaataaagcctaaccagcccacttcacgtacggaaacggcccaagcataaagaaacagtgcttcaacatcgaaaattacgaaaaacatggcaactaaatagaatttagctgacatgcgcagacgagcgctgccaacggaatcaaggccagattcataaggaacatgtttagcccttgcttgtgcacggccgcctaaatagcgggcacccagcaacatgagcgaacataaccccaatgcgcctattaagaagacagcaaatgcccaatagtgggcgataacttcggtggtcgtagacatactcattgcttactcatcaaaggtggtgtcaattaaccaactcttatccggcggtttacaccacatttattaatacgaaaaaaaaggtaaaacaacagacttgctaattaaataaatgataacaatctatttaaacctttcttcttttaaggaaaacattgtgataactcactcagttttccgtcgcttcttaacaaatttaacactcatttttaacacccaattactggccaatgctaaaacgtgtcagtcaacctacaaattttctgctaacacgcttagtctaaccgataattcgattttactacaccagtatctcaggaaaaacctgactctatataggcaaatgtgccttatttttttgatcaaactcacaaaatagtcgaaaaaatacataatcagtttaaattttatccaaattttaacaaattaactttccaataatgtggagaaggtcaaatatccgttttcatttgactatttattccctgaaaacctagacaaaccttttatttgttaacaatttctacaagcgtgtaacccatcacaactgcatacaattttttaacaaagcgactgagcgggaaaagagaggtggatcacactgtgatatacattaatctctataaatattaaaccaatgtgactatttaaaaataaagcataaaaaaacggaaacaaatgcgtttatagcacctgtttccgttgattgtgatatatcactttattgtttcgtttgactatttttaaccgttaatatgggttatccaaataatcatgataacaatatcactctgcgccttactctaaatctaaagaatgcgcttcttcaactgaagtgacagtataaggcgttttcttattttcgatggcattgaataccgttaatacagcttcgttttgctcatcaaaattacgatataaccagtactgagtctcaggcaaacgaggtaacccttcactttcgcctaatatacgtaaatcagcattttgcatttctaatggacgagctgtgatccccacttcggcatttacagcagcacgaaccgcagataaagaagccgcttcatacgcaatacgccattgaatacctgcgtcatctagtgtatttgttgccaactgacggaatgggttagtttcgtccatgaccactaaaggaataggctcattcatttgtaattggaaatcaggggcacaatgccacaaaacaggcgctgtacgtaacgctgtgcgtggatgatgtccaatacgtgcagtagttaatgctaagtcgatttcgtggttatcaagcatagtctcaataaattgagaacgcttaatacgcacatcaaccgctaaacgtggatatactgatgcaatacgatttaacaaaaatggtagtagtgtatcgacggaatcatcagatgcaccaatacgtaactcaccttcagcatcgctatatgttaatgaagcagttgcatcatcattagcacggagaatttgacgtgcatagcctaataattgtaagccatgctctgttaacagtttattacgaccatgacgggcaaagagttctctgccgactaattgctctaaacgttgcatctgctgactgactgcagattgagttcgacatacagcggccgcagcggctgcaaaagtattcaaatctgctacagcaacaaacgttctaagcagatcgaggtcgagattcattatcggacgatttgcattaatcattgtttattcttcacttatttttgatttttaaattacatatacctggtgttttttatcaaaagtctaaattggacttccgattcagacagtaccttactctgaaaaagagagcaaagacatactgaatactttacatttgtttgttgtcgtttacacctcctagttcgcaagcaactgcatttttttgtaacaaattaaattttattatcattctaaggatctacaagaaagaactgtataccatcattacaagttagatgtagatcatacaatgctctctaggaatacataaattttaacatttttaaaataatttaaattaccttaactgtgtatgctattttaagtatccacccttataaaatatatttaagatttcaatttaatttatataaaaactatttgattgatatgaataaaaatagatttaaccatattatttgaaaatttaatatattaagtaagataatacaaatccgataaaattattcaataattgattatgcaacatcttatcaacgtccctctcacatctggttattgttaaaaaacgcactaaaaaccctctcttcaccagcataatgtttttgatttttattcaaagtaagaacataccaccagattaagtgatactttcagtcatcaaaataagttctttagaataaactgaccttttacaccaaaaattatctagcatcttcaaaagtttgtagtgtaagagtagagtgatagaacagttaatttgctgggacagccttttcatttatatcttcccgagatgtgtatgagaaatataaatgtcgctatgtagataaagtcatacccgattaggtaaacgtgctatgaatcaaataaaaaaatcaagtaaactcgaccatgtttgttatgacattcgaggaccggttttgcaagaagcaaaacgtctggaagaagaaggtaataaagtattaaaactcaatattggtaacccagcacctttcggttttgaagcgccagatgaaatcttagtagatgttattcgtaacctacctagctctcaaggctatagcgactctaaagggcttttttcagcacgtaaagccatcatgcaacattaccaagcccgtgatatgcgtgatgtaactgttgaagatatctatattggtaacggtgtttcagagcttatcgtacaagctatgcaagcattattaaatgatggcgatgaaatgctagttccagcgcctgattacccattatggaccgctgcagtttctctttctgggggtaatgctgttcattacatgtgtgatgagcaacaaggttggtttcctgatttagatgatatccgtcgtaaaatctcccccagaacgcgcggtattgtgattataaaccctaacaatccaaccggcacggtatatagcaaagagattttgctggaaattgttgaaattgcccgtcaacacaatttgattatttttgctgacgaaatttatgacaaaattctttatgatgatgcccaacatcactctatcgccgcaatggcacctgatttattaactgttacctttaacggtttatcgaaaacctatcgtgttgcaggattccgccaaggttggatggtacttaatggcccgaaaaaacaagcaaaaggctatattgaaggcttaaatatgctggcatctatgcgcttatgtgccaacgtgccgatgcaacacgcgatccaaacggcattgggtggctatcaaagtatcagtgaatttattctacccggaggccgtttatacgagcaacgcaaccgcgcatgggagcttatcaatcaaattccaggggtttcttgcgttaaaccaatgggagcgttgtatatgttccctaaaatagacttaaatcgttatagtattaaagatgaccaaaaaatgatcctcgatttactattacaagaaaaagtcttattagtgcaaggtactgcatttaactggcctcaccctgatcatttccgtattgtgacactccctcgtgagaatgatttagagatggcgattcaaaaattcggtcgttttattgtcggctaccatcaatagttattattaataaagataaaacgcaatatcactgaggttatattgcgttttttattttctttctgatcaccgtttacatctagtgtctatccactcacaataatctcttcaatcacgctattgggagatattatgagttacttttttgcccacctttctcgtttaaagctaattacacgctggcctctgatgcgtaatattcgccaagaaaatgtctctgagcatagtttacaagtggcttttgttgcccatgcattagcggtgattaaaaatcgtaaatttgatggcaatgtcaacgccgagcgtattgcactacaagcaatgtatcatgatgccagtgaggttatcaccggtgatatgccaactcctattaaataccacaatccacaaattgctcatgaatataaaaaaatagaaaaatatgctcagcaaaaattgattgaaatgttacccgaagagttacaagaagattttcgccctcttatcgatgagcaattacatagtgaggaagaaacgtttattgtcaaacaagctgatagtttatgtgcctatttaaaatgccttgaagagttagctgcgggtaatagcgaatttaatttggccaaaaatcgtttagaaaaaacgttagcagaaagacatagccctgagatggactattttatgcaagtgtttgtaccaggctttagtttatccctagatgagatcagtgaataagtagcaaaaacgccgtttagccgtttataataaatgaaactaaacggcgtttttgcaaaagataaccgattaaaatgggaataatagcggtattaagaaaacgctaatcaacatcacaatgatggtaaaaggcacccctattttaataaaatcagcaaatttataaccaccaggctcaaggatcagggtattaaccggggatgatacaggtgtcataaacgccgccgatgcagcaacaccaataaccattgcaaaaggtaacggagagacattcatttgatgagctgctgctattgcaatcggtgccattaacaccgccgttgccgtattagagataaataaaccaatagtggcacaaagtacaaataaacagactaacataacctgtggccctgcattccctgctacatccataagtccattaacgataagctcgatgcccccagttttttgcaatgcagccgcaaaaggcatcatcccgacaatcaagataatacttggccaatgaatagaacgataagcactttccatatctatacagcgaaattttcccatcaataagcaagcaattaacgcggcaataaagttaggtacttcattggtcaccattaatgcaaccattaatgctaatgaaaaaagtgcatgtggtgcttgcgatgaggccggtgcaacagtatcaatttcagccgctaaatttaatacaataaaattacgcggttttgtcgaaagtatacgaattaatttccaatcaccaataaccagtaacacatctcccagacgtaatggctcatcaacaattttccccggtaaagcactcccttcacggcgaatagccacaacgtttagcccataacgtgtacggaatttgatttctcttaatgattttcctaataattctgagtcagggttcatagagacttctgctaatcccacatcacgagattgctcagaaaaatactctccacgtaacaccatcggctctaacatttgttcacgacagaactctcgtaaatctacctcacttgctgacatatccactaataggacatctcgctctcttaattcagtgcctcctgtcgcactgaccataacacgccgaaaacgcctccagcgttcaataccgacaacgtttgctccatagcgagagcgtaaatgtaattcatctagagagtgaccaatcagtggtgaacctttacgtatggctaagcgacgtgcacgccctgctaattggtaatcacggataagatcacgaaaagtacgacgataaacctctttttgcttacccccttcacttgaacctaaccaacgacgtaccaccagcatatataacacacccgcaactaatacagcgatccctattggggtaatagagaaaaactgaaaactgggtagcccttccctaactaattcactattaaccaccatattaggcggtgtcgcaactagggtcattaaaccactaattaaccccgcaaagccaagaggcatcattaatcgactgggagaagttttcatccgtgccgccacactgagcaccacaggaataaaaatagccaccacccctgtcgagctcataaaagcccctaaacttgcaacacagatcattaatagcaccagcatttttacttcactactacccgcaactcgtactagccaatctcccatttgatatgccacacctgttcttactaatccttccccaataacaaaaagggccgcaatcagtaatacgttcggatcgctaaatcctaccgtggcttcatttaatgagagtgtgccgctaagaacaaaagcgacgatgacaagtaaagcgaccacatccatgcggattttgttggtcgtaaaaaggacaatagctatcaatagcaggcttaaaacccataataattcgctattcaaaatggcctcgatcagcaataagtgaaaacagattaatacgtcaattcactgcattgataagtagaccatttttaccaatataaatctcgttatatgatcaaataaatgattaacatttatgcttaataacgacttgctgattttctttgtcaatttgtaaatcatttaatgaatcaatgattaaatcaatttcattacgacgaggaagggaaatcggagcatgtacggcaataacctgacacccggcatctaaaccagaataaatacctgcagcagcatcttcaaaaaccacacactcttcgggagccaagcctaatttttttgcccctaaaagataaggctcagggttgggtttcccttgagtgatacattctgccgtcacccaatgtttaggctcaggaatacctgtaactgactgacgagtagaggcaattggtactgtgcctgaggtgacaattgcccaagggatcgctaagtcgtttaagcgattaatgagttcgatagcccccggaagaggggctaatccttctgtttgtgtcgcttctaacttttctagccaacgaaaagtctcttcaatctgtgcttgcgtagcattaggcataaaatggcgaatcgactcaatggccggctttccatggatatagttattaatttcttgtgttgatacccctactcgctcaccaaatagtgcccaacagtattcaacaacaggcaatgaatccactaatgtaccatctaaatcaaaaagaaagcctttacaggtgattgtcatattttatgcctaccttatcgtgatgcgttaataattacgcattcagtatttgttggatctcaacactgcttaggtgatattgacgtggacaggctaaccaaacagccagcattctttggtatttctcccacataggagtttgagagttaaaaccatgactaccactatcaaaatgcgtatatcgcccttcagtattgaccataaagcgtacatagctaagataacgagattctgttgctgcatcaaagcccataaatgccactcgacgagcatccggcatttctggtgattttaaattttctcgagaaacttgcaatgcatggtacatttccatgatgttaataatggttcggcaggtctcttctgacatctcatcaaaatcgcggtctaattcacgtaattgtaatccataaccacgttcaataattgtctgatagcgacgataacgttcagcgttatcaggatccatcatggtcatcattttatattgattagagaggatcaagcgttgtgcgtgtgtcatttccatcattaattctccaaagaaattattggagagagcatggcattaatcaaaacacttgagtagtgctaacaacacgttttttgatctaaacaggggtaattttaatccattaaataacccatgaagaaggtagaacaaatgttctacacatcatcaagaaaagagcgatcaagttgcttaaaagcacgtttaagcaaatgcgctaatgagagataggttggcgtcttttctactggggctaatgcaatacccgcttgctcaaatttttcacgaatttcataaaaccaattgagtaacaccgcgggtaatggcgttgcagcgcgttttcctaaccaccataatccttgcattggcaggctacaggcaaaaagtgcagtagtgatcgccggccccaaatcgccacctaatgcaatttgccaggttaatgtaaaaatagcgataggaggcatataacgtatgccaaaacgcgttgcttttatcattctattttcaggaaaaactggggctaattgcttctcaaccggccaggtttttagatactcgttccctaggcgtaactttttgaagaaacctgggggagtcactgtcggttcgttcataatgacctcaatcaattttttctataacttttaaaaaacatctataaagaataaaaatcttttagtagaattaagtatattttgtctttgttgcctttactctgtatcctgtgctcattctaaaggtttgtggcaataaagcgctatattttgtttgccggcgtgattttcaacccttttcgccgattttcgggcaaaaactttggggtgaataaaaatcgtccaattgatgattggcaactataattagcatcaagttttttaccctaagcatgatgcgtatcattaatgtcatcatagtaatgcgataggcttttatgagtgacgttttattaaccatcgtctttataatataaaagacactacgacaacaagataaataggtaattccatgtcaagtaagctggtgctggtactgaactgcggtagttcttctcttaagtttgcaattattaacccagaaaatggtgaagaattcctttcaggcttggctgagtgcttcaaccttcctgaagcccgcctgaagtggaaaatggatggtcagaaacatgaagcggctttaggcgctggtgctgcccacagcgaagcattaaactttattgttaatactattctggctgaaaaaccagaactttcacaacaaatcgcagcaattggtcatcgtattgttcacggtggcgagaaatttactaaatctgtcgtcattactgacgaagtcatcaaaggtattgaggcggctattccatttgccccattacataacccagctcaccttattggtattgaagaagcgcgtaaagccttccctcatttaattaataaaatggtggcagtatttgacactgcattccaccaaacaatgccagaagaagcttatctgtatgctctgccatacagcttatataaagatcacagcatccgccgttacggtgctcacggaactagccatttctttgtttcccgtgaagcagctaaaatgttaaataaacctgttgatgaactgaacgtaatcacttgccatttaggtaatggtggttctgtttctgctattgttaacggtaaatgtgttgatacttctatgggtttaacaccattagaaggtttagtcatgggtactcgtagtggtgatatcgatcctgctatcgtgttccatttacatgatactttaggtatgagcgttgaagatattaataaactgctcactaaagaatctggtttattaggtttaacggaagttactagtgactgccgttatgttgaagataactacgaaacaaaagctgatgctaaacgtgcaatggacgtttactgccatcgcttagcgaaatacatcggttcttattgtgcactgatggaaggtcgtttagatgccattatcttcactggtggtatcggtgaaaatgcagcaatggttcgtgaattatcactgaaaaaactcgctctattaggttttgaagttgatcatcagcgtaacttagatgcacgtttcggtaaatcaggcaccatcactaccgataacagccgtcttgctgttgttatcccaactaacgaagagttagttatcgctcaggatgctagccgcctgaccgcttaagttttttgatgtactgccagtgttatgctggcagtactgtttcacataacgagcaaccgatatttaaagaggtttccgtgtcccgtacaattatgctagtcccaactgatacacgcgtaggtttaaccagcgtcagcttgggtgtaatccgttctatggaacaaaaaggcgttcgccttagtgtattcaaacctatcgcacagcctcgtgttaaaggcgcattagatcaaaccactgcgattatccgctctcactccacaattcaatccgcagaacctttaaatatggattacgttgagtcattactcagctccaataaaaaagatgttctgatggaagaaattgttgctagatatcacgaaaatactgctgatgcagaagttgtactgatagaaggcttagtgccaatgcgtaagcacccttttgcacaatctttaaactatgagattgccaaaacattaggtgctgaaattgttttcgttactgcattaggcaacaacaccgctgagcagttaaaagagcgcattgaatttgctcgtgctgaatttggtggtgtaaaaaatcaaaatatcacaggtgtgattgttaataaattaaatgcccctgtggatgatcaaggtcgtactcgccctgatttatcagaaatttttgatgactcaagcaaagcgattatctctaatgtcgatttaaataccatcgaaaaaaatagcccacttcctttattgggttgcattccatggaacttcgatttaatcgctactcgtgctacagatatggcaaaacacttaaatgcgactatcatcaataagggtgatattgaaactcgtcgtattaagtctgtgactttctgtgctcgtagtattccacatatgttagagcatttccgcccaggttcattgcttgtcacttctgccgatcgcccagatgttttagtttcagcatgtcttgctgcaatgaatggcgttgaaatcggtgctatcttactcacaggtggttaccaaatcgatgcaccaattaaacaattgtgtgagcgtgcatttgaaactggtctacctatctttatggttaattcaaacacttggcagacttcattaaatctgcaaagctttagcttagaagtgccagcagatgaccatgagcgtatcgaaaaaattcagaactatgttgctcaacatatcaataaccaatggattgattcactgacagcaaactctgaacgtcctaatcgtttatcaccaccagcattccgttatcaattaacggaattagctcgtaaggcgaaaaaacgcatcgtattacctgaaggtgatgaacctcgtaccgttaaagccgcgtctatttgtgctgaacgtggtatcgcaacctgtgtactgttaggtgatcctgaagaaattcgtcgtgttgctgcagcacaaggtgttgaattaggtacaggtattgaactcatcaatcctaaagaagtacgtgaaatttatgtacctcgcttagttgaactgcgtaaaaacaaaggtatgacagaagttgttgctcgtgaacagttagaagataacgttgttctcggtaccttaatgttagaaaaaggcgtcgttgatggtcttgtttctggcgctgttcatacaaccgctaacactattcgcccaccactacagttaattaaaactgcacccggtagctcattagtgtcttctgtgttctttatgctattaccagaacaagtctatgtttatggtgactgcgcaattaacccagatccaaccgcagaacaactggctgaaatcgctattcaatctgcagactcagcaaaagcgtttggtatcgacccacgcgttgcgatgatctcttactctacaggtaactcaggtgctggcagtgacgttgaaaaagtgcgagaagcaactcgtttagcacaagaaaaacgtccagatctgattattgatggtcctttacaatacgatgcggctgtaatggctgacgttgctaaatctaaagcaccaaactcacctgttgcaggtaaagcaactgtgtttatcttccctgatctaaacaccggtaacactacctataaagcagtacaacgttcagcagacttggtttccattggaccaatgttacaaggtatgcgtaaacctgttaacgacctttctcgtggcgcgttagtcgatgatatcgtctacactgttgcattaactgcaattcaagcaagccaacaagaaaatgcctaattattgaattcacttcaataaattataaaaacgccagttcatatcactggcgtttttttataatggttgataaatcaaaaaacacattataaaccccacctataaaacaaaataactcattgatttaataaatctttttagctttattttggcaaaataaacagagacacacggctattttctgttagtatacaggcgggtgcttggatcattttggttcaagcatttgcaaggaccaaaaagacgaaagccccgaattctatttacataaaattcgaggcagtctcaagccatcaacaacttgattctgtctcctttaacaaggagtgtcaagagaaatgactaagcttgcccttattgggctgattactgtatgtattacagttttgtgttttaccctactgagacatgaaagattatgctcttttaatatcagcagtggtaacaccctagttcaagcgaatttatcttgcgataaatagctttgtgggggaattttcccccacaatttctcacccaatgttgttgcgccttgtgttcacaagcaccctactttaaacaatcatatcacttgcgttcaatatatatcacggacgtttttaaatagatcacaaatcaaacaacgcattataaaccccacttataaaacaaaataacccattgatttaataaatctttttagctttattttggcaaaataaacagagacacacggctattttctgttagtatacaggcgggtgcttggatcattttggttcaagcatttgcgaggaccaaaaagacgaaagccccgaattctatttacataaaattcgaggcagtctcaagtcccaaacaacttgattctgtctcctttaacaaggagtgtcaagagaaatgactaagcttgcccttattgggctgattactgtatgtattacagttttgtgttttaccctactgagacatgaaagattgtgctcttttaatatcagtagtggtaacaccctagttcaagcgaatttatcttgcgataaatagctttgtgggggaattttcccccacaatttctcgcccaacgttgttgcgacttgttttcacaagcaccctactttaaacaatcatatcacttgcgttcaatatatatcacggacgtttttaaatagatcataaatcaaacaacgcattataaaccccgcttataaaacaaagtaacctgttgatttaataaatctttttagctttattttggcaaaataaacagagacacacggctattttctgttagtatacaggcgggtgcttggatcattttggttcaagcatttgcaaggaccaaaaagacgaaagccccgaattctatttacataaaattcgaggcagtctcaagtccagacaacttgattctgtctcctttaacaaggagtgtcaagagaaatgactaagcttgcccttattgggctgattactgtatgtattacagttttgtgttttactctactgagacatgaaagattgtgctcttttaatatcagtagtggtaacaccctagttcaagcgaatttatcttgcgataaatagctttgtgggggaattttcccccacaatttctcgccaacgttgttgcgccttgtgttcacaagcaccctactttaagtattcatatcacttacattcaatactagtgttttatattaaaatttctcataaatgcatattaatgtaatggttgttagagacaaacaggtgagctaataaattattgtctattctatttataagatggtaagaaagaataggacgatagcattatgaaaatatcacatttctatcgatggatagtattcatcatactcacaatattggcgctttactttactgtactcggagggtatttagtttcattagcaggatcgcctttttatctctttaccggtgtcatgcttcttattattgcagcttgctttctaagtcgaaagaaaagcaccctattactctttaactttctatttttaataacgattgtctggagtatctgggagtcaggatttgatttttgggcactcgctcctcgcttagatattatttttattctaggcttactccttattcctttcacactcaataataatgtttacacttgtcgtaccaataaaattggcttattcacactattagccacaacacttatcattatattaggtagttcactaaccgatcctcatgccattaatggtcaatttacacaacaacagcccaccaactctatatctcctatcggagtaaatgataatgactggcccgcttatggcagaacgcaagccggaatacgctattcaccattaactcaaatcaacagtgataatgttgataagttagttgagaaatggacttttcataccggtgatgaaaaaagagctaatgatgccgttgagataaccaacgaagttacgcctataaaaattgaagataatctctttctatgtacacctcaccaatatttaattagcttagatcccgcaacaggtaaagagaagtggcgttttgattctaaattgcaatataacaaaagcttccagcatatgacttgccgaggggttgcctattataatcaaaataatagtgccgaatttgccaaaagcctcgacgttcgccaaccaagcatatcagatgaatgtcctgaaaaagtctttcttccagtcaatgatggccgcctaatcgcagttaatgcgcaaacgggtaatgcatgccgtgattttggtcagaatggagaaatcaatctgttagcttctatgccttatgcttatttgggtggatataacccaacatctccccctatcgtcaccggtaatactattattataggtggctctgttactgataacttatcaactcaagagccttctggtgtgatccgtggctatgatgttaatagcggaaaattaatatgggtatttgatactggcgcagaagatcccaatgcgatgccaggtaaagagactcaatttgttcataactctcctaatgcatgggcgcctttagcttatgatgcacaaacggatgtggtctatattccgacaggagtaggtacacccgatatttggggaggcgatcgtcatccattaaaagagcgttacgctaattcagttttagcactaaaagggtcgacaggcgagctattgtggcatttccaaaccacccatcatgatttatgggatatggatgtaccttcgcaaccatcactggttgatatcaaaactgataaaaatgaaacaatacctgccatttatatcgtcacgaaaacagggaatgtgtttgttcttgatagaagagacggtacacctattgttcccgtaacagaaaaacccgttcctaccagtgtcaaatatggtccacaaacacaaggtgagcattactcacccactcagcctttttcagcacttaatttagcacctaaaaataagttgcaaggttcagatatgtggggcggcacaatggcagatcagctgttatgtcgtatcgctttccatcagttaaattatgagggaatttatacaccaccatcagaaaacggtacgcttgtttttcctggtaacctcggtatttttgaatggggcggtatttctgttaatcaagatagacaagtcgcggtaatgaactttattaccttgccttttatctcaaaactttatttaaaagatcctcaagatagtcaagcaattgacgcaggccacggagagcaaggtttacaacccatgacgggaacaccttatagtgttgatattcatccattcttatcaccactaggattaccttgtaaacaacccccttggggacttgttgctggtgttgatttaacaaaaaatgagcttgtttggcaacaacgatttggcaccattagggatagtttgcctaatttagtggaattaccaccattaaaaattggtgttcctgggctaggaggcgctatctcaaccgcaggtaatgtgatgtttgttgctgcttctcaggataattatattcgagcatttaatgtgacgaatggcaaaatgttatgggaagcacgattacccgcaggtggacaagcaacgccaatgacctactctattggaggcaagcaatatgtggtcattatggccggcggacatggttcatttggtactaaaatgggcgataacttagtggcctatgggttacctgataatttatagctttaaattatcaataatatcaggcgattgttattttcaatcgcctttttattatttgctaacactcacaacctagcttaatcaactaatacccgttgattggttgctccccataaaattgacatttcggtaaacaatgcaccactgatatcttcaatttcttctgcggtaatttcgctattaccttgtttgccaaaaaatacaacttcatcacctggtttgatattgttaagactggtaatatcaaccataacggtattcattgatgtttttcctaaaacaggtacgcgttgcccagcaattaatgcatgccccgcattactaaaaacgcgacgataaccatctgcataacctacaggaatattagctagtactgagtcacgttttaatgtgtaagtacgatcatagccaaccgtattacctttaggataataattgattgaagcaatgttggatttaaaggtcatcacacgtttatagtctgtacttgcaatggtatcaccataaaaaatacctcccacacgtaccatatccagccatgactcaggcacggtaattgtcgcaaaggtatttgccatatgtaatgtgacattgttacgctctaatcccatcacctccaacactttctgagattgttgcttaaaacgagccagatcttcccttactttattaacatcttcttcgggataatgagacataataccaaccacttttaggttagctaattgagaaatttgttttgctttttcaagcccagatttattatcgacctctaaaccattacgagacatgccacctgaatttaatgctaaatgaataggaatgactttattttgttgcttggcaatagcatctaatctttttgccatatcaagatcaccaattaactcttctacgttatagttggttgcctgtgccatttcttgttctgtcgcattacgcactcgcattaaacggcctttaaatcctaaatcacgtacttcttttaattcttggttatttgttacaccaatacattgcacattattttctatcataattggggcaactaacgataaatcatgcccataagcatctccttttaacacagcacaaagagaggattgcttacctaataatgattggactttttttacattaaagtcgagtgcgcttcgtgaaatttcaatccatgaattattgacaatagcaggctgagcttgagccacttgagttgctggtggattataatttacaggctgttggcaagcagtaataacgaaaagtggtaataacgcaagatatcgaatagctaaagacatcttctttcttccttagtgattatgatgttaaacctatttttataattaattaggcacaaaaatatacacatagtgaatattcacttaggataatagcattattattcagataataaatataaaaattcatctctgcataaatgccaataagagagaggatttaaatacactatttctaccaaaaaaatgcccgactggttaaaaagtcgggcatttattaaaattccactaataagtaatatcaacgtcggtaatattaacgaacaataatccctaatagaataccaatcacaccgaagtctgcatcactaaatgtggtattggcaataccaatatcaccaagtacaggtaataaaaatacgggtaagaaagtaatcaataaaccttgagcaaaagcacctaaaatagcacctcggcgtccccctgtggcgttaccaaatacgcctgcagttgcccccacaaagaaatgaggtaccaccccaggtataatgacagtccaatctaaagcataaagaataaacatgccaatgacacccgctgcaaaactactcagaaaaccgactaaaacggcattaggtgcataaggaaataccacgggacaatcaagcgcaggttttgcattggggactaacttatcagaaatgcctttaaatgcaggaacaatctctgcaatcaccatacgtacaccttgtaggataatataaacacctgccgcaaaggtgatggattgcattaaggagaacataaaccagtttttaccaccactaacttcacgaacaaaagtgtcaccggcaaataaacacgtaataataaaaattatgcccatggtgaaagcgatcgcaactggcgtatcacgcaaaaagagtaaactcttaggtacattcatctcttccgttgaatgcgctttattgccaaatttactaccaataaaaccagatacaacataggaaatagtagagaaatggcctaatgcgacatcatcagagccggtgatctttttcatataaggatgtgcaatggctgggaaaaataccattgataccccaacaactaatgaacctactgcaactaataccgccccttctaaacccgctgttgccaaaatcaccgcgaccatcatcgacataaataaagtgtggtgacccgttaagaaaatatatttccacggtgttaagcgtgcaattaatatattgattaacatggcaaagaacataatcagtgccatctctttaccaaagcttttttgtgcaatagagacaatggcttcgttattaggtacaacaccttgaatgccaaatgcatgttggaaaatcgttgagaaatcaccaagcgagttaatgactaaacctgcccctgcacctaaaataacaaaacccataatagttttaacggtgcccttaatacattctgtcgcaggttttttctgagcaattaaaccaatcaatgcgattaaacccaccaatatagcaggctctgaaagcacatcgctcattagaaagcggaaaaagtccatactaggctccttatagcgcgcctaattcacgtaatgcggtcgaaagtttctctttcatcgcaactttatcaatcatattatctaaagaaacaattttgccattaaccgcttgagcattaagttgttccgcaatatcacgagttcccacataaatatcactcggtgtcccttttgccgaacctaaatcgacatgatcaacatcagcattgacggccagatcttttaaaatacttttgatgctcatttccatcattaagctacttcctaaaccatttccacatacaacggtaattttcatcatattccccttggttatttaaaattgaattaatagtgattaataacagccaatacttctgccttactttttgcttgcaacaaagtgtctatatcatcttggttatcaaaaagttcagctaatttcacaatggcattaatatggctatcgttatctgttgcggctaaaacaattaaaagtttcaccggatcattttcatcagcaccaaattccacccctttttcgatgatagttaatgctaaagagagctgattaaccccttcttcaggacgtgcatgaggcatagcaatacctggtcctaatacatagtaagggcctatttgctcgtgtgatttataaatcgcatcaacataacgaggctcaatacaacctttgtcaattaatggctgacaggcgattttaattgcttcacgccaatctttgacttgtgggatcacttgtaccacatccggtgttaataatgttttaagcatatttataacctcagtaaggtgcttttttgatctctgtattaaggataataatcactaatggtagcgctatctagatagattatgtgtaattgtgatagcgctattattttgatgaaatgttaattgcgaataagtgcaacaattgacactgtattgtttctgcagagtgggaaaatttcaggtaggatctgcgaattaaaaataaagccgaataaatctgatcacgatgataaaaacacgtaaacgccgaaatacaggtcgcgtcactttacaagaagttgctaaacatgccggagtcggttcaatgaccgtatctcgcgcattgcgtacgcctgaattagtgtcggataaattaagagaaaaagttaaccaagcagtggcagagttgggatatatccctaatgcctcagcaggggccttagcttccgctcaaagccatattattgctgtactactgccctcttttactgataaagccagtgctgattttatgcaatcattgcagcagatcctcagccgtcatcattatcaaatattagtgggatgttatgaatatcagctccataaagcaactgatgtaattaatatgctattacagagtaaccctgccgcattagttgcctttggctcccaattaagtgatgtacagttcttacatatcagtaatgccaatgtgcctgttgtcagtgtcgcgagtcaatctaatgagcaatctgcaataagtattgattgcggttatgaaaaagcggcatttgatttaacccattatttaattcagcaaggtaaacgttgtgtcggctatgttggtgcgctacaaggacaacgtttacaccaccagcaaattactggttggtcgcgtgctttattaaaaaattatttaaatgctgagcaaagtgttactacgcccgaccccgcttctatggcatatggtcgacaagcattaacagagatcttattacgtcagcccgaactagatgccgttatttgtagccatgagagtattgctttgggaatgatgtttgagtgccaacgaagattaattaaaattccccaagatctcgctatcgcctgcttagaaggctctgaaaatagcgcccaaatagcaccttccctgacatctatacattttaattaccataaaataggtaaagaggcaggtaagcacctaattgcactattgcaacatttacgtgatgaggttgataacgctatgtttgaaaataccgttatcaactatgcttatcgtttagaactcggacaaagtaccccttagtcagtggtttcttttgtgtccaagcgagtactattatttcgcgttaaccatagagagagtgctttaagtgaatcaggggtaaattcatcacaacgttcagtgatttctaagggagtaagccagcatacttcctcgatttcttctggctgtaatgcaaatggcccatgtgatacacaactaaataagcttccccaaacgcggcaactctcatcgtcataatagaattgtccatgttcggcaaaaggaaccccggcaatacctagctcttcttctgcttcacgacgtgcactttcgagtgcattttcaccttgttgtactacaccacccgcggttgcatctaaccaacctggatagaaatcttttgtttcagtacggcgttgtgccaaaatttttcccatgccatcgtgcacgacaatataagttgctcggtgacgtaggttttctgctcgcatttgttgacgtgttgcttgtgcaacaacttcatttttttcatcaacaatatcaacccactcgaccactgccgtattttcttgttccatcctcaacaaaccttttttaatcgatgctaaacgatcgtaatttttatcctgaatataccaaaatcaccatatttcaccactataataatcataggtaatttgctttattcatcttgcgattttttgctttttatgatgttactaggcagactgtaaaatatacgctattgaatatcaccttattgcggaggttttatgatcgatctttattatgcaaacaccccgaatggccaaaaaattacgcttttcctcgaagaagtcgccatgccttatactttgcatcatgttgatattggcaaaggtgatcaatttaaacccgaatttttagctatttcacccaataataaaattcctgctattgtcgataatgctcccgctgacggtggtgaaccactctctatttttgaatcaggtgctattcttatctatttagcagaaaaaagtggcaaattacttagccatgatctgcgagaaaaaatgacccaactacagtggctattttggcaagtggggggatttggtcctatgcttggacaaaatcatcactttacgcgttacgcccctgaaaaagtaccttacgcaatcgatcgttatacaaaagagaccgagcgtttatatcaggtgttagagagccgactcgctcaatctccttatcttggtggaaacgattatagcattgctgatatagccacctatacttgggctcgttaccatgacacacatcatattgatctagcagattatcctgcggtagaaaaatggctaaatacaataagccaacgtccagcagccaaaaaactgtttggttagtgactaatctcacctatcaggatgatacaaccttaattaggatagagtaatcaggaggatggtgatgaatatacttatcacaggtggaaccggattaattggcagagcacttatctgccaactcgcattagataaacataatattaccgtactttcccgttcgccacagaaagtctactctcatttctgtaatgaaatggcgtgttggacgcatttagatgataaagaaaacttaaaccaatttgatgcagtgattaatcttgctggagaaccaattgcagacaaacgctggacaccggagcaaaaacaaacgttagttaatagtcgatgcaaattaacccaaaagctggtggatttaataaaagccagcgactctccccctagtgttttaatttctggctctgcggtgggtttttatggtgatcaaggtgaaaataatgtcactgaagagacgccacctaaggatgaatttactcatcaactctgtgccaaatgggaaaatattgcactcgatgcacaaacgccattaacacgggtgtgtttgctacgtactggtattgtactctctacaaaaggaggggcattacctaaaatgagcccgccttttaaattaggtttaggtggaaaattaggtaatggtaagcaatatatgccatggatacatattgatgatatggtcaatgccatcgtatttttacttaataataacaatacccaaggcgcctttaatctgacagcccctcatccagtacaaaataaagcatttaccacgactttagctcacgtactgaaacgccctgcatttatgacggttcctgccacaatattaaaattaatgatgggagaaagtgccacattagttttaggtgggcaacaagcgtttcctaagaaactgctcgatgcaggattcagctttcgttacccacaactggaaggcgctttagaagatattattcgccataaaaaatagtcactcgtcacacaggggatcaacgggcaggtttatccccttgccaacgctgaaaaagatcatccggcaagtcaatgtcaaattgatcaagcactcgatttactgtctgattaacaatgtcatcgatcgttttaggctgaaaataaaatgcaggtactggtggcataatgatggcaccaagctcagcagcttgagtcattaaacgtaagtgccctaaatgtaacggtgtttcgcgtacacatagcactaatttacgtccttcttttaacacgacatcagcggcacgtgtcactaacgtatcagtatagctatgtacaataccggagaggcttttaatcgaacaaggtaaaataaccataccattgacccgaaacgagcctgaagagatagtcgcccctatatctcgatcgtcataaataatatcagctaaagcatgaatatctttgagagaataatccgtttctaatgaaatggtacgacgcgccgcttgactgatcaccaagtgagtttctacggttggcacggatttaagtatttctaataaacgaataccataaattgcgccactggcacctgttagcccgacaatcagctttttcattataatcctcagaatatatatctttgttaatcattatgatgattaaccctcaaaaaacaagcgccgatgtagtgttacgctagcatcgacgcttgataaaggtggctattttaacggaaaattagccttcgttatagatttctaagttctcagcttcatgttgatcacgaattttatgttcatcatcacgacgtaaattttcaaggtaatctaaatagccttgatcaatatcttttgtgatatagacaccatcaaatacagagcattcgaattggttgatatctggattttcttcttgaacagcggcaattaaatcagagagatcttgaaaaataagtccatcagcaccaatcagtttacgtatttcatccacttcacgcccatgagcaattaattcattggcattaggcatatcaataccataaacattagggaaacgcacttctggagcggctgaggcaaaataaacttttttagcccccgcttctctcgctaactcaacaatttgctctgatgttgtgccacgtacgatagagtcatcgataagtaacacgtttttatcgcgaaattctgcacggttggcatttagtttacgacgtactgatttgcgacgctcttgctggccgggcataataaaagtacgtccaacataacgattcttcacaaaaccttgtcgataaggtttatttaagatgtgggcaatttctaatgcaatatcacaagaagtttcaggaatagggatcaccacatctatttgtaaatcttcccactctttagcaattttagcgccgagtttttgccccatacgtagacgggcgttatatacggaaattttatcaataaaagagtctggacgcgcaaaataaacatactcaaatagacaaggcactaattgcggattttcagcacattgacgagtaaacagttgtccttgctctgtgatataaacagcctcaccgggtgctacatcacgcaagaattcaaatcctagtgtatctagagcgacactttcagacgcaaccatatactcactgcgtccatcttctaaagtacgtttgcctaacactaaaggacgaatgccataaggatcacgaaaagctaataagccgtggccgatgatcaaagcaacgcaagcataagcgccacgtaattttttatgcatagccgcaacagcggtaaaaatattatctggctctagcggaaaatgatcgaagcgatctaattcatacgctagcacattgagtaaaatttcggagtctgaggtggtattgatatgtcgacgagcagtttcaaataattgacgacgcaacaaatgcgcattggttaaattaccattatgtgcaagtgtgatcccaaaaggtgagttaacataaaaaggttgcgcttctgatgcactcgaactgcccgcggttggataacgtacatgtcctattccgatagttccttttaaacgcaacatatgacgcgtttcaaagacatctttcaccagcccatttgctttgcgtagacgaaaaccgttattctcatcaattgttgcaatgcctgctgcatcttgacctcggtgttgtaacaccgttaacgcatcataaatcgattggtttactggattaactccagcgataccgacaataccgcacatgaaaagatcctcatcagccagacggagaggttacattttctccgacacgaaacttgacgcattttgtaggtagtcaaagaaccacctaataatatggttgaattgaggaataagctcagaacgttgccaatcggcactgtctgccataggagtaaaagcacccaagacaaaaagtaacgctgatacaatcagcacacctcttaaagccccgaaacagatccccaacacacgatctgtacctgataaccctgtgcgttgaacaagagagctaatcacataattaatcaccgcaccgacaattagcgttgcaataaacagtgtgacaatcgcaatcccgttacgaaccagctcatcttcaaaccgagtaaaatagacggctagataaggataaaactgacttgcaacaaaaaaaccacaaccccaggtgataagtgataatgcttcacgaacaaagccacggatcaggctaactaatgcagaaaaaccgataatggcaataatggcgtaatctatccagaccataaatctctatccaataacgatgccccgcattaatacggtagcattctaacagaaaacgaaaacgtttgcgtaacgctaattttcgataattttaaaataatttacggcgacatgaaaaatcataatcgccgcaataagttaacaccttgttacttcactcatctgatgtctcatcaacatagttatggtttataggctcttacttcaccttgcaggcctgttagctctttaaggcgaggtaacatcgcctgtaactctgcttttgaggcattaggcccaatatagatacgtgtcacttttcctgaaacagggcgagcaggcacggtatatactggataaccggagaggtgcatttttgcaataatttcttcaactttcgccgcatttttcaaggcacctaactgcacaacccaagcctcacctttcggcgcggttgtttctgataccgccggtggcggagtagttggtggctctacaggcggattaaccactttaggtggctcaacaaccggggttgatggcgctacttgaggctccgatacttcaggagtagaaacttgaggctgttcaacccccgttaccgcttcagagatcatcgcctcagaagcaccctctgatggcgttgacggtgtcgtggtttgctcaatcggcgctattgattcaatatcttgctcatcaccgggtttggggactaaaggaatagaggcaaattggtcttcgttatatttcttatcgccgtcaaataatgtaggaagaaaaataacccctaccgccacaagaacaacggctccgactaagcgattttgaaatttacttgccactcgcactctccttttccaatagttccattacatgagcaacggtatggaatgatccacatacaaccacaatatcatttttttgcgcctcagatattgcttgttgccatgcttgctcgacactatcaaatactgccggatagtcgaggtgctgagctaatacctgagctgatgcgccacgaaactcattcaatggtgcaacataccactgatcggcttgaggggataaacacgctaatgtacccgcaatatctttatcacccagcataccaacaacaatgcgcactttggtatcagaataacgcggtaattgcgccagtttttcggctaaatatccagcagcatgcggattatgagcaacatcaaaaataactaatggatgctgcgaaattatctgaaaacgtcccggcaactgagctttactcattccctcaacaatactttgatgggtgatcccttggctcactttatcgtcgcttttcaataagcagcgtattactgccattgccgtacctgcgttggctaagggaatattagggatgggaagtttttcaaactgcttatctgcactacgccaatgccagtgatcaccatcaatagaaaatgaccaatcaacaccacgacgaaataatttagcctgtttctgttgcgcgacttgtgcaatagacagtggcatatctggctcgcctacaacagcatagtgatttttacggaagataccggctttttcatgaccaatatgctctctatcagcccctaaccaatcggtatgatcaagggcaatactggtgatagctgcaatatcggcatcaacaatattggtcgcgtctaaacgcccccctaacccaacttcaagaataaccacatcaagctgagcttgttgaaatagtttcaatgcggcgagtgtgccgtattcaaaaaaagtcagcgaaatatcgcctctggtttgctctatttcagcaaatacttgacaaaactcagctggtgaaagctctttaccttgaatgcgaacacgctcggtataacggacaagatgaggtgaactataaacccccactttcaatcctgaagccatcaaaattgactcgagcatatggcaagtggttcctttaccattagtacccgatacagtgataactttaggggcaggacgtaatacattcagtaattgacctaccttgcccacgcgctcaagtcccatatcaatagcacttgagtgtaagtgttcaagataagaaagccacaccgacaaaggcgatgtggcttgaggagcagttatgatattagacatcttcttttttattcgtttcgatgttaatttctggctcattgtcagaagattcgatgtcatcagcgatcatttcttcgcctagcagttcatcttcgtctttcgctaaatcatactgagtcagcttagccagtaattcagctagctcatcacgcatttcaggacggcgaactatcatatctatcgcccctttttctagcaggaattcactacgttggaaacccgcgggtaatttctcacgtacagtttgttcaataacacgtggaccggcaaaaccaatcaaggctttcggctcagcaacattaatatcgcctaacattgctaaacttgcagaaaccccacccatagtaggatcggtcatcactgagatataaggtaaaccacgctcttgcattttagctaatgcggcactggtttttgccatttgcattaatgacatcaatgcttcttgcatacgtgcaccaccacttgcagagaagcaaatcagtggacaattatcttctaatgcttgttcaaccgcacgaacaaaacgcgcacccacaaccgacgccatagagccgcccataaatgcaaattcaaaagatgcggccacaacaggcatttcttttaacgtacctttcatcaccactagggcatctttttcatgggtttgtttctgagccgcagcaattctgtctttatattttttagagtcgcggaatttcagaatatctttaggctctaactcactgcccagctcagtcgtgcttcctgtatcaagaaaagtttctaagcgacggcgtgctgaaatacgcatgtgatgatcacatttggggcacacttctaaattacgctctaattctgcgcggtaaagtacttgcccacagctatcacattttgtccaaaccccttctgggatattggctttacgtgaactcgtgatattgcttttattaagaattttttcaatccagctcattaacggaccttttcgtctgaatctgaccttcgccagtttatactcgtcatattttaagttgcagcatgttgactgcgtttaattgcacaagtcacctactttgtcggtgtgcttttcgtgctgcattcacttatcgcctagctacaaccctaattatttagagcagattattgtgaacatgttaactcacaatatactggctatgtggttagcaaagtttatgatgataccgcttactgaatttcagcgcatctctttattattgctattctacggcaaaagctaatgataactgctcaaacctcttggttatcactctcttttttggcctttgcactcgctctacgatggcgtatcacttcgataacacctggtaaaatagaaataacaataatggcaacaattagcaattttaagttcttttgaacaatatctaagtcaccaaaaaagtatccagcataagtaaatagcagtacccatgcaatggcacccgtaacattataaaaagcaaaatgacgatatgacattttgcccattcctgcaacgaatggcgcgaaagttcggacaatcggcacaaatcttgccaaaattatcgctttaccaccatgtttttcatagaaagcatgggttttatctaagtattctcgtttaaagatacgtgaattgggattactaaagagtttttcaccaaaaatgcgcccaatagaatagttaaccgcatcacctaaaatcgcagcgaaaagcagtaagagaaccattaggtgaacattaacatcattggtatctaacgcagataaagcccccgcaacaaacagtaacgaatcgcccggtaagaatggtgtgacaacaagccccgtttcacaaaaaataattaaaaatagaatggcatatacccatgtaccatattgagcgactaactcggctaaatggacatcaatgtgtaaaataaaatcaattagaaattttattaaatcagcaaattgcgttaataattccataaatcctcagaaaacggggtaattttatgtttaaagtatttaaaatgggttatctgctaaaaatagcggccccattgcaggtttaggaagttcgaaacgttcagggtaatcaaccgaaacaagatataaaccatttgcttttgcagttgctgctgctttagtcctatcttttaaggctaataattcagccatccaagtaatagcctgattaccacagccaatttccaatagactccccacaatatttcttaccatatgatggacaaaagcattggcttttatatctaccaccacataatcaccatagcgtgaaacattcacatgcatcacattacgccaaggtgttctagattggcattgtacggctctaaacgaggtaaaatcattctcgcccaataaacattgggcagcttgatgcattcgttgtgcatctagagggtaatggaaatgcgttacccctgaggataaaattgcaggacgatagcgatgattaaaaatcacataacgataacgtcttgcggttgcgctaaatcgagcatgaaaatcattcgctaccgtttttacccaacgaacggcaatatcttgaggtaaatgggtattaacccccatcgtccatgccgcatctttgcgatgagccgttgtctcaaagtgcacaacctgcccggttgcatgaactccggcatcagttctgccggcacaaaaaacagagataggctcatttgctacttgagataacgctttttctaacctttcttggacactacgaacctcattttgacgttgccagccataatagtggctaccgtcatattcaatgcctagcgctatctttaatggtgtactttctgccacaatcgcaggctcactgattgactgcgctatcacatcagcactctcttggtcgttcatcagtaaaactgctcctgcactaatttttcagccacttctacagccattaatgctccgccaaaacgcacgttatctgcaacagaccaaaattgtaacgcttcaggcacaccataatcattacgtaagcaacctaagttcaagctaacattaccggaggcatcggtgacttgagttggaaaatcattttcatcactaatattgagggagtcatgttcttgtaatgtttcccgtgcttcttcacttcccattggacgtgatgtttccaactgcacagattgtgcatgaccatagaaaacaggcgcttgtaatgtggttactgagataggtagtccatcgtcttgcaagattttacggatctgatcaaccatttggcgctcttcttgaatagagccttcattatcaactaacaatggtaaaatattaaatgccagttgtttattaaagcgaccaagttctggaggaacaccgttcagtaagcgcgcactttgccccgctaattcatcaacagcttgtttaccaaaacgagatactgacatcaaatttgtcacattcaagcgagttaagcctgcggcttcggttaatggatagatagcgcgtaacagttggcttaccatgctatcagcaatagcgataatattgcggttacgatactctgccagcatagatgtattcacccctggtacaactaaaggtacatcccactccatcgcaaataaaccactgcaatcaataacaatacaacctgaatctgctgcaagttgtgcgtattgcgcactaatctcaaccggcgcggcaaaaaaagcgagttgaatatccgcccattcgatattatgaataccttgtactgcaacacttttaccctttacacggatagttttgccaatactgtcttcactggcgatcgccgttaattcgccaataggaaaatcacgctcttgcagaagctctaaaatagcttcacccacagcacctgttgcgcccacaagcgcaatattccaaccctctcccataaaatatcctccaatacagtaaaatgtttaaataatgtcacgtcttatttatgtgttgcattaaacccaatagcattgagtaagctcgccgttgtcgggttatcacataccacctgtaatgaagaccattcacgacggacagggtaaaacttacgtagcttatcaaactcccctttgataccggcaactttgcgcaatggtgcatcatcacgacgtacatcatagacaagatgaataagctgtttgagtaatgtttgagttaattcaccttgtacagaaattgtggagatcaacggttttggtaacagtgttgataattcaacgtgttgaggttgaccaataaaatcacaataagcctcataaacctgcgttgttcctctcgccttcccttctaaggtatagccagcaatatgtggtgttgcgatatcaactttatttaataactcaagagaaagatcgggttctggctcccaaacatctagaacaacgcgtaactttttaccttggtttaaggctgataataatgcagcattatcaataacctcgccacggcttgcattaattaaaatacgaccttcaggtaaaatatcgaggttgctctcattaattaaatggtaactgttataacgacccgatttatttagcggtgtatggaaagtcaggatatctgcctgctttaatagcgtttctaaagaatgaaattgttcatcatcccctctgtcagctctaggcggatcacaaagtagtacattcacacctaatgcgcgtaagcgttttgccagtctccctccaacattgccaacgccaacaatgccaacggttttatctgttaattgaaatccttcttgctcagcaaacaccatcaacgcagagaagacatattcaacaacagcgatcgcattacaacctggcgcagatgaaaacgctattttttgttgctctagccatgctgtatcaacatgatcaaaacctgccgttgcggtgccgacaaattttaccggtttgcccgctaatagtgatgcattgactttagtaatcgatctcaccatcaatgcatcagtatcatcaagctcttcaataggtaaagggcgacccggtacagcttttacttcgcctaattggcaaaaaagctgctgcgcataaggcatgttttcatcaaccagaattttcacggtgttatctcactgatttgttttttatgtgtgtaaacaaaggatcaaaaataaaattaagcggtctattttgccacttattccaagtaaagcctattattgacgataaaaactgacgctattttaagtaaatatatgaaaagaaaccttaaccattgggtaagcgacgaaatctttctggtgttgttccagcaaattgctgaaacatggcaataaatgaggatgatgagctatatccaacatcaaaggccacatcattaacactttttccttgttctaacaaagagatagcatgtaaaaaacgtaatcgcttacgccattcactaaaagacatgcctaactcttgctgacaacgacgtgataaggttctttctgaggtataacgtttttttgcccataattctaatgaggtattatcagcaggattttgctctaatgctgccaaaacgggtgctaacagcttatcttttgaggaaggtaaataggtatggtgaataggagatacttttagttggtctattaacacttgagataaacgtagatcttcttttgtttgcggtttacaaacgccacgacggaagaaatcggcaaaaatcgtcgaaaaaataggacttagttgaataagacagggtttatccaataaaccttcacaccaactgggtgcaatatctagcaccttaaaagataaggtttttttattgtaacttgcgtgccctactttttcagggatccatacactaaattcaggtggcgctaaaaaacgttgcccgccagcttctaaatccattactccagagatcacataaagcaattgaccaaactcatgttgatgataacgaaattcagtttctgcaagcaattgctcatcacgaaaacggaccgtatctggatcagagagtaaccactgcatctctttttgttgttcaattgtcatcttaatgttgctcttttatcgttttgtctttattggcctatcggttgtctgcttttcattatatatatctaatcagacaggcttacaatagccatctggtttaaaaatagatgtgagaataatgaaaagtgtaatcttcccgctgttagcggtacttatttggtcaattaatgcggttgtcaataaagcggcaacatctgtgatagatccagccgctatctcattttatcgctggttcttagcatttttactgatgacgccgtttctgttagtccctgtttggcatcatcgtaaaaccgtaaaacaatattggtggaaattatttattctcggcgcattaggtatggggttatatcaaagtttagcttactatgcggcttattatgtgacagcaacctttatgggaatattgaattcacttattccattattaaccgttattattagtatttttgtactgcgtgtcgtgcctactgtagggattgcactcggaactattttatctattagtgggcttgtctggttagtcagccacggtgatccttcacaactcctttctcaaggtttaggacgtggtgaattaatgatgtttatcgcatcaactgcctatgcattttacggagtacttaccaaacgttggtcaattcctttacctaattggcagtctctatatgtacaaataggttttggtgttttattactaatacctaattttcttaccgcagaaagtattgcattaacaaaagataatgttggattagttatttttgcaggggttggcgcctctattttagcgccttatctgtggatcttaggtgtaatgaaattaggtgcaaatacaacctctatctttatgaatttaattcctctatttaccgcaatgatcgctgtagcagtgttaggtgaagagatgcacagttatcattttattggcggaggcgttatattgttagggatattcttagtacaaaaactaagagcaccactgaatttccgtcgtcaatctgtcacaaaaaaagcagattgtcagcaggagatgtgagtcaatgtcagctagactataaataaaaaaataccggctaagcaattagccggtcactttgctcccctagtttttataaataaaaaccaaggcaagaaaatcaaagtataaaatataaagtaatacaagtatccgttgcaaacattaccaacttttatattaaatatctcctgcttatttaatataaaataatccagatcaatttttcccctcacctttttaatgctatcgatattttcattaagttaactatttataaaataaaggatttaatctataaaattagtttttaattaaatgattgatttaaaatcatagtgaaaacaactaattttaaacaattagatagttattttatctattggatctgtatgataaaaaaatgacaatcaataagattatgctttaataatatttacagcatttttttaacatagttttctataaaaccaaaaggatctttatttattttgcagaacaaatttatttatacaaaaaataaaaaagcagtcacttattataagcaactgcctttatcatttatacaaggaaatctaagtataactaactatttcttatacttactcatcacaagtgaagcattagtgccaccgaaaccaaagctatttgacatcactgtatctagtttttgctctgttggtttggtaatgatattcataccatccgctttatcatcaagctcttcaatattaatacttggtgcgataaaaccatgctctaacatcagtagactgtaaatggcttcatgaacacctgcagcccctaatgagtgacctgtcattgccttagttgcagaaatagccggtgttttagttccaaaaacttcagcaatcgcttcaagctcttttaaatcacccacaggcgtcgatgtaccatgagtattgatataatcaacatgatcaataccttgcattgccatttgcatacaacgtacggcaccttctcccgatggagcaaccatgtcagcaccatcagatgttgcaccatagccgacaatttcagcgtagatatgcgcaccacgtgctaatgcgtgctctaattcttcaacaaccacaataccgccaccaccagcgataacgaaaccatcacggtttttatcataggtacgagaagctttggctggtgtatcattatattttgttgaaagtgcccccatagcatcaaactcacaggtcatctcccaacttagctcttcaccaccaccggcgaaaaccacatcttgtttacctaattgaattaattcaaccgcatgaccaatacagtgtgctgatgttgagcaagctgaactaattgaatagttaacacctttaattttaaacggtgtagctaaacaagctgatacaccagacgccattgcacgagttaccatataaggacctacaccgcgtagacctttagctctcatgccgtccgaaccttgtacttggttacgaggagaaccaccaccggagccgacaactaaaccagaacgaatgttagaaacttgatcttctgttagacctgaatcttcaatcgcttgttgcatagataaataggcataaaccgatgcatcactcataaaacggcggattttacggtcaataagaccttcagtatcaagcttaacattaccccaaatgtggctacgtagccccatctctttaaattcttctgagaaagttatcccggaacggccttcttttaaagagtccagcacttcttgctggttattaccaatgctcgaaacaatacccagacccgtgatcactgcgcgcttcatttatacctctttacaataatagttgtagctgcgggatttctgaatagcactttagcgtacacttgtacgctgaacaagtccgatcaggatcttttttacaaaaatgcagataatatgaaaaatctctgcgtactcaaaaggtggaagatgcttaagaacagcgttaagatagcccattatttttggtaaaatacaggtagttccgtgaataacactgctataaataccgcctctttaagttggaatgaacttggtactccgatttcaaaacagtttgatgatatctatttttccaaccaagatggtcttgaagaaactcgacatgtattcctacatggaaatcattttccatctcgttttggtacacatgtacgctctgagtgtgttatagcagaaaccggatttggcacaggattaaactttttaacactgtggcaagccttcgagcaatttcgtcatcactcacctgatgcgccattaaagcgtttacattatgtcagttttgaaaaatttcctctgactaaagctgatttgcaaacagcccatagccattggccagaactagcacaatattcaacagcgctttgtgcacagtggcctttacctattgccggttgtcatcgtcttattcttgctaatggcgcgataacgcttgatttatggttcggtgatatcaatacattactgccacaaactcgccaagctttacataataaagttgatgcgtggtttcttgacggctttgcaccaagtaaaaacccacaaatgtggagtgaaacattatttcaagcaatggcagactcgatgcgtgaaaatggcacttttgccacctttaccgcagctgggatagtaaaacgaggattgcaacatgttggttttgaaataaagaaaataaaaggctttggtcaaaaaagagaaatgttaacaggggtatttccccatcctcctgccaatgcatttgttccctactatgccagaccttgtgctacacaaagaaaagatatcgctattatcggtggggggatcgccagtacattaactgcactcgcctgcttaaaaagaggcgccaaagtcacgctctattgtgaagatacacatcctgcggcaaatgcctcaggcaatcggcaaggtgtgttatacccattacttaatggcaaatctgatgagttagaacactttttcactagcgcttttttatatgcccgccgttattatgatgagttaaaccataaaggcgtaaacttttcacatcaatggtctggtgttgcccaagttatctataatgaaaaagtacgcaaaaaaatagcgcgaataatcgagcattccacacctttttctcaacttgctcattatgttcatcaagatgaaatgaattcactttgtggattagccatcaaccaagatggtcttttttatcctcaagcaggttggctttctcccacagagttaaccaccaatgcattaaaatacgcacaacaacaaggtctcaagctactctttgaacatcaagtcactcaattaacctcacaacaacagcattggctgttagaggtgactcaccaagcaacaacgtataaaacacaacatgattgcgttattttagctaatgggcaccgtattactgattttatacaaagtgaaaaactgcctatcagtgcagtaaggggtcaagttagccatatttcaacgacacctgatatcgcacaattaaaagcggtgctctgctatgatggctattttacgccggttgatcctcaagataatctgcattgtgttggggcaagctttcgtcgtgatcgactagatttaaatgtttcaattgaagagcaacaaaataatcaatggcacctcacgcactgtttagcacaatcaccttgggcacagcaggtagattttagtgataacgatgcacgtgtcgggatccgctgtacaataagagatcaccttcctttattaggtgaagtacccgattttgaaaaattagttgtcgcctatacgcatttagatcgatttaagcgtagaaagcaaacacctattttggcaccgagttatcatcagctttatattattagtgcattaggttcacgtggtttatgctctgcacctttatctgcggagatcttagcaagccaaatctttgatgagccatttcctgtagaagatagtgtgttaaatgccttacatccaaatcgtttctgggtaagaccattactacgcggaaaagctattgaattaaaatcataggatcagtcactgaaattacggttgatatttaagtaactattgttaatgggttacttaaatatctttatagtatttaaattatagtatttaaatttcacacttcatcgcacaacgcatttctctcgcaaatcccccatgctctacttcattatctaaaatttgttgtaaagaatagggtatttgatgctcaagtaagatatggaaacctaaacgctgataatagggggcattccaagggacatcgcggaaagtcgttaacgttatcgcattaaattgctgtaatttagcttcattttttacagtctggatcagcaatttaccaatccctttattttgccaatctttacttaccgataattcatgaataaatacactttcaggtaattgttgcgtcatgataaaaccaacgggatgattgtcatgattaacagcaacccagtgagcatgttgatggataaattgaatatgcgcctcaacactttgtacaccactttcgctgatccaacttaattcttttatgctgctaaataactctcctgccgattgttcaatcttcggtagttggttggcatcagccaattgagttggccgaatagtgatctcgtgagtagcgattttatttgatgcgttggtcataaataatctcttttataacttgctatttgcttattaagagtatcaattacctataaaaaaaccatccataaggatggctttttatccgttctaccaaaaatttaatctctaggtaagatcccataagattgatattggctcgcttggtgaataaaagaattatagtatttattatcttcaacagagttttttactgctctttcactatcggcttttgataacttatttattgcttcatgtaatggtgttttaagctgtttatggatattaggatcattactttctttaatttgatcaagcaatgcaacccaattttctgcctctgcttgaatatcaggatcagtaaattgtggttgaggtaaactgtagtctaacgctagattaacagtatcgttatactcatcttgaggggaaagcggttttagatcttgaccataatcagtcataatatattggattaattcaggtttatcaaaacatttggttttgatgttccccatttcgtttttattatggcttttaatttcactggggaaaggttcacctaacgtataagtacatttaaatacattgccatcaatcaaggtagcattcgtgctttgtaatggcatttctaactgatagccattaataaccactttatattctgttggtttaaagcgatctcccttaccttgtacagcatagacttcagataaacggtaatacataaaattatcaggatttaaaattccaccattgttgttttcatacaccataaaagtggatttattacctgcactatcttgtaaactatgttcgcccggtgagagtgttaaataaccacttttacccggctcaacctgatatgttttatcatcaacaacaaagctcatgcttttttcactgggattactgtaataaaacttatcttttttattatctaaatcaagttgatcacaggcagataaaaccaataccgtgctagcaataaggcttattttaaagaaatttttcatcgtattgttatccttatcataaatattttatgcaaatcatttgcatcccgagaaacattcctaaaaaacatttaaaagtaatttggcagaaatggcaaggagtaacaaaagatagcactattatgctttaatcaatgaaagagacatcgactttgaaaaatcaaataaaaacaattgataaatagtaaggagaatttttgtataaaatcctttctttttcaagctcaactgtcttaaacaaggttttcgatgtggttaatcgttagcaatcaaagaaaaacaaccgatagtatcggttgttctcaatataggttatttatactaattaatcgagttaactaaatcatgccacgtcgataaaaccaatatttgatcaggaggagaaagctctcctgctttgatagctttttgaatgctctcttctacacgggattttaatgctgataattgcgtattgttttcttgctcaagctccgcaatcgctaaagtgatgtggccttgtaaatatccaccagcaaataattcatcatccgtagcatgttcaacacggctatcaattttatctaataagtacgtttcatactcagaaagcattatttatcctcaatatataatgttgctatcagatttaagtcactcgatgtttcaatagcaaccttattacctcaggctttattggtttactaaaacctgcgcagtggatagacgaggatagtttatctcgtcatccttaattaacgaggggattttcctgataaggaaattgctccggcgttaactcaggtgtattgtaaaacaaatgtaacgcattaataaatagctgtgcacgtggcgggatatttttatcgcgcaaataagctaatacttgctctctcaccttgtttctaaactggtaacggtctggctcaaaatccccgtctaaattatcgcaactcacgttaaatggataattggctgcttggcagaataaccagtcaagagcttgaggcttgatttcaactcgttcaaactgctcttgagtcacttgatctcgcccatcaggacaataccaataaccataatcaacctgctgacgacgcgcgtccccagcaatacaccaatgcgatatttcatgtaatgcactcgcgtaaaatccatgtgcgaaaatgatttggtgataaggtatctcttcactcttaggcaaataaattggctcgttatcacctttaactaaacgtgtttggtaactatcgctaaaacattgattaaaaatatcaattaactgctgataatgatgtgctgacatttaaaaattatctttcctaattaaaaagtgcagaaaaccaaagtgcaatagtatcaccatgattgtcatgaatgagtttgatgctcatcaaaaaggagataatgaccagcattggtctaattaatttttgtcctttggttaacaccaaccctgcacctaagcgagcaccaataaactgcccgcataacataactaaacctatggtccaaattacctgtccaccaagaataaaaaatagcaaagagccaaaattagaggtgaaattgagtaatttagcatgtgccgtcgcctttgagagattataaccaagtaacatgacataacctaaagcgaaaaaagatcctgttccaggaccaaaaacaccatcataaaagccaataccaccgccaataataaccccgaaagtataatagccaagacgttgcttactatccttagccccgatagatggtgttaataaaaaatagagaccaattgcgatagtaagaacaggcagcgcttgttttagtaattcaggattaataaattgtactaacatcgcaccagaaacagcaccaataaaagtcataaaaatggcaaagcgctgtgcttttaaatcaatgacgcgacgacgaataaaatagagtgtggctgaaaaagaaccgcccactgattgaagcttatttgttgccaacgcttgtacgggtgatattcccgcagagagcaaggcaggaatagtgatcaagccaccaccgccagcaatagagtcaataaagcctgctaatacagcaacaaaaaagagtagaaggtagatgccatctgaaaatagccaatccatttatctatccgaattatcagaaatgagggggcgtgtgttactgatttatttgattattttaaataaaaacagtaacactatctgagcatagaataataaggcgctcacacctttaaaaactcatagcaaacttactacagattatgcgctgtattattgatgtaagctaagatcaccattgcattaatggaggaataacatcaccacattgaccccgttgacgtaacgcatgatcaagtaacacaatagccatcatagcttctgcaataggaacagctcggataccgacacacggatcatgtcgccctttggtgatcatatcgacttcttcaccttgtcgattaagtgtcttaccagcaatagtaatacttgaagttggctttaaagcaatgtgtgcaataataggttgaccactactaatgccacctaatacgccccccgcgtgattactgctaaaaccttctttggtaatttcatcgcggttttcagtcccttttaaggtcaccacatcaaaaccatctccgatttcaacgccttttactgcgttgatgctcattaacgcatgagccaaatcggcatcaagtctatcaaaaacgggttcgcctaatcctgcaggtacaccttctgcaaccacggtaactttggcacctatagaattaccctctttttttagcgctcgcatatattcatcaagggcatctaggcgagaaggatctgggcaaaagaatgggttggtttctacaattgaccaatcaactaactcacaactaatcggccctaattgagataagtaaccttttacttcaataccaaatttttgtttaaggtattttttggcaatagcacccgctgcgacacgcatggcggtttctcgagcagaagagcgtcccccgccacgataatcacgtaaaccatatttctgttcataggtgtagtctgcatgccctgggcggaatacatctttaatttcgctataatcttgagagcgctgatccgtattttctattaataatccaatactggttcccgttgttacaccattaaaaacacccgataaaatacgcacttgatcaggctctctacgttgtgtggtataacgtgaagttcccggtttacgtctatctaaatcaacttgtagatccgcttgcgttaaaggtaatccgggaggaacaccatccacaatgcaacctaacgctgtgccatgagactcaccaaaagtggttactctaaataattgcccgatactgtttcccgccatccctcaattcctatcttatgactgactgtgtgatgttattaatatgttatttgcaaccataacaatctaccgtttcatcacattgacatcaacgtttatcgctagcaaagctatctgaaaattcgacaagttgctcacgcgttaacataaagacaccaatgcctcccttttcaaactcaagccaagtaaaaggaacttcaggaaattgttcgataagatgcaccatgctattaccgacttcacagacaagaatgcctttttcgcttaaataatcaggtgcttttagcaaaatttgtctggtgatatctaagccatccacaccagaagccaatgcaagttcgggttcaatatggtattcatcaggcaagtcacccatatcttcagcatcaacgtaaggtggattcgtcacgataatatcgtatggtgtaggaacaattgcctcaaagagatcagattgcattggataaacacgatgaattaaaccatgattttcaatattaaactcggcaacttctaacgcatcagctgaaatatcgactgcatcgacttctgcttcttgaaattcatgggcgcaagcaatagcaatacatccactgccagtacataaatcaaggatacgggttggctcttgcccaatcagtccagcaaaatggttattaatcaattcaccaatgggagaacgagggatcaaaacacgttcatcaacataaaattcatgtccacaaaaccacgctcgatgcgttaaataaggcacaggaattttttgttcaatacgaacctcaataagttgaatgatttccattttttcagaggttgtaagtttggttgataaaagagcatcaggaatatctaaaggaagagccagtgtaggtagaacaagctgtaacgcttcatcccatgcgttatccgtaccatgaccataataaatatctgatgaattaaactgactcatagcccaacgtaacatatctaagatcgtgcttaaatcagctacggcttcttcttttgctgtgatatccaaaactgttgtcctctgacggatctgacgaaatagaaagtctgtagtttgccatgaagatcgtgataaatcagcgttagataataaaaaaagacaatattattaaattcatctcgttttatctttatgacgaaacaaatttaatattagccagataaaccaaataaatcacacaaaaaccatacaatcaactaacaacagataaaaaaccagaacaaataattatatttatcactttaactagtaattataagaaatcgatccatacttatttacatgtgatttattattgaactgaacagtcagtaatatcaataacatcttgttctgcaattggttgttctgtttacgatgttgttctctcaataatactttttcgatttattaggagatgaaaatgagcagtaaaaaactaacccctgctgaagttaatgatgcacataaactccaaacccgtcctctatctacccctacagatttagcacctaaagcaacaaaagaagttagtgcagcgatgaatgctattcttgcggatgtgtttgctttatatctaaaaacaaagaacttccactggcatgtgagcggtcctcattttcgtgactatcatctaatgttagatgaacaaggtgatcagctctttgccatgacagatcctattgccgagcgtgtacgtaaaattggtggcatgacattacgctctataggccagatctcaaaaatgcaacgtattaaagataatgatgctgaatttgttgaacctttagatatgttagctgagctatgtcaagataatcaattacttgcagcagaactgagaaaagcacatgttgtctgtgatgaaaataacgatatttctaccgcaagcttaattgaaaattggatcgatgaaacagagcgtcgtacttggttcttatttgaagcttgtcgacgtgcagaaacatcagggcactaattaatctatttgctagctatgtgactattttggcagggatcccccctgccttttttgtttcatctatttaacaatagttttttatctccccttatatttaaggtactattatttatagatatagatgatagcaatgatgaagaacgctaaaaatgaacaaaaaattcatattacctccttcagaaatagaattatttcaggagatgataaaaggcaccaaaaagctcccacaagataaaatacgccaccaaacaccgcgaaaaaaagtgactcattatccaacagagcgattacagcaagagcaaatagatgcttcttactatttctccgatgagtttcaacccaacttggcaacagaaggcccgatgcgttatttaagagaaggggcaaatgcgtacgagctaaaaaaattgcgtcgtggtgattatgtaccagagttttttttagatttacatggattaacacaattaatcgccaaacaagaaattggtgccttaatcgcggcctgtagaagagagcatgtgtattgtgcctgtattatgcatgggcatggtaaacatattttaaaacagcaaacccctctttggttagctcaacaccctgatattattgcttttcatcaagcaccaaaagagtggggaggtgatgctgcactattgctgttagtcgaaaatgatgatattgcgcgtcgttaacatcaccgaataaatccgaacaatataaataacatatagactttattcggtaatttgttttaagtttgctggggagacttgccacagcaatttccccgagcctattgataaatcaaaatcaacacaagcaatcgttgaggttgaaaacatcggtgcactcactgttggacaaagctctgccacgacataccctactaaaggtagatgtgatataactagaatattgtgataccccacttcccctaatgcccttaaataatgagcaatatgatcaggattgcccccaggaataagcccttcatcggtttctatcttagcgggtaatactaagccttgttgcacaacattcagtgtttgttgtgcccgcaaataaggactaactaaaacataatcgatactatgatcttgctgtgtcatccaattcgccatggttaatgattcatattcaccacgctctgttaaagatcgtagtgcatcactgggcgcatcaaaagtagcctcaccgtggcgcataataaaaatttgcataatcaatataaacctattttgttgttatcatttctaagggtatcaatacataaagcaagtaagaataacaaatatctagtcttaaccaaaagccccaaacaaataatacgctattttatccagtaaatttgctctatttggtatattttaacaccaaaaaattatatttaatctcttattaaaacaaactgtctttagaatataccattggcgtttattgtcccccaaaaacacttttcactcagctatcattaacatttataagccgatttttgattaataataacaccttgtttaatcagcgcttaatttagcgaaaaacgccgtaacccctcgcccaatgagtgaactgcatctcaattatataggtacaaaaaaaggcgcataagcgccttaatcatcctttctactcattgcattatagaatagatagttagctatagaatcgttcatttaactcggccattgctgctaatcgctcacatggctggaacttttcaccgtatttttcagttaattgattaagcttatcgactatttttgttgttcccatactatctatataccggaatggtccaccaaagaagggaggaaaaccaataccgaaaacagcaccaatatcaccatccctaggttgttgaataatgttttcatctaaacaacgaacagcttcattaagcataagcaataaacaacgttcggttatttctgaagccgataactgatttttaggtttaacctgtaataagcgataaatcatcggatctgcacgctttttattttttcctaaagagaaaggtaaggcatgctgattatagagataaaaaccacgaccgtttttacgcccttttctgtcatccgcaataatcgcatcaaccgcaggaggagatgcaaaacgctcaccaaactcattgactaaaataggcgttattttagtaccaatatcaattcccacttcatctaaaagttgaatggggccgactggaaagccaaattgaactaatgccttgtcaatattctctatcgtttccccttcaaccaaacaggttaaggcttcactaatataaggggcgagaattcgattgacataaaaaccgggtttatctcctaccacaatggcaactttgccttgttttttagcaaaagcaacggttgtggcgattgtcttagcatccgttttttcatgagggatcacttcaactaagggcattttttcaacgggactaaaatagtgcagcccaattattttttctggatattgtgctttttcagcaattttatggataggaagagaagacgtatttgaagcaaagatgatcttgccttcacctaaggcttcaatatcagccaccattttttgctttaaagccaaatcttcaaaaacagcttcgacaataaggttagtttgatggaaaccgctataatccaatgtccctgataataaccccatttgtctttggcgttcacgagcagagagccgttttttcttgaccttagttgataacgctttccaactatagttaagtgcctgcgcaatacctttatcactaatatctttaattctaacgggtaaattaccttttgttgctgtcacaaaagcaataccgccccccattaaccccccacctaaaatacctatatggtgtaagttatctggctttgcagatgatcctgtttcatttttcaatgctgttgaggcaaaaaagagatgccgtaatgcagatgaaaccggggtcatggctaattcaccaaacgcattagcttcttctttaaaacctgtttgaatatctttctctaagcctcgttcaataacgtgaagaatacgctctgccgctgggtaatgacctttggttttagctaaagtgcgctttttagcttgatcaaagaggatatttcttcctaatgtggtatttgcccaaaaacgctccataatagtctgttttttagcagcttttttagctgttaaaatccattgggctgcaacatctaataaaatagcttgtggtacaacgtcatcaactaagccaagcttgaaagcccgtttggcattaatttgtcgtccagttaaaatcatatctaaggcggttgtaacccctattaaacgtggtaatctttgggttccccccgaacctggtagtaatcctaattgaacttcaggaaggcctaaacgtgttttactgttatcggagcaaattcgcccatggcaggctaatgctagttctaatcccccacctaaacaggcgccattgatggctgcgacgacaggcaaaggataattttctaattgagtaaaaagatcttgtcctgcttttgctaatgcggtggcctcttctttggttttgcaatctgcaatcattgatatatcagcaccagcaataaaattatcaggtttacctgaggtgataattaatccttttacacctgaatgttgctgagcctgttttaatacattttgaaactgttcaacaaaagcagctttcagtgtattgaccttttcatctacaacattaatggtgataattccgaccttatcgggacgcactgaaaactggaataccggtgatttctctgatgaggtttgtatcctttgttgagtcgccattattccacctccaaaatcatcgctgcacccaatccgcccgcagcacaagctgttgttaaaccaaagccaccacctcggcgtttcagttcatgtaatgtttgagtcaccattctcgcccctgttgcagcaaaggggtgtccataagcaatagagccaccaagaacattgaatttatccatatcaacttcgcctattgcttttgacagtccgagttgctcttgagcaaatttatcacttgcaaataaggttaagttactcaacgtttgagccgcgaaagcttcatgcatatctattagtgttaaatcactcaaagtaagaccggctcttgatagtgctaacggagtcgcataagaaggccccagcaacatatctttccagacatcaatggcggtaaaagcataactacgtagataacctaaaggttgatagcctaaacttttggcaacagactctttcatcattagcacagcagcagcaccatccgtaaggggcgtactattagccgctgtcacactaccgtggcgcctatcaaaggcaggcttcagttttgcgtaagaatcaagtacagaatttttgcgaatattattatcttgatgaaaacctgatttataaggtgggaaaaatgccgtcataacttcgtcatttaattttcccatttcccacgctttggcagctaattgatgagagcgatgtgctaattcatcttgcgcaactcttgaaatatgataagtcttagccatctgctcagcagtatcccccatacgcaatcctgtggaatactcagccactgcgggtgcaacgggtagcagatcaccaaaacgtagttgacttaaataactaagccgttgccctaatgttttcgctttacttaaactgagtaaaacatcggctaattttttactcacgccaatcggtaatacagaagatgaatctgcgccaccagcaatacccactgaaacgtgacctgccaacatactttcagccacattagcaatagcctgaaaactcgttgcacaagcacgggttacactataagcatctgtttttacacttagccctgcgccaagtacaatttcgcgggcaatattcggtgcggcaggcatttgtactacttgaccaaacaccagttgatcaataatttcaggaggaatttcattacggatcactaattcttgtacaaccgagcgccccagctcaaccgcagggatcccccgataagcggttgcttgtttagcaaatgggagacgcaatccactgacaatcgcaacacgatcttttatggtactgctcgctgatgacttcataacgactcctgacaaaatgaattcctaacaccaaagaggtctgacctgattaatagagttaacaaaattttcacttatcagaaacatcattttataagaagtgggagttagcgctcattatttcattcaattagctgtaactcgaagaaaacaataaaaggaaggaataaataatgataaaaaataaaaaaggctactgaatttcaatagccttgaagaagtttaatttcaaaggattaacgtaatcctaattggaagatcagattttctgcttcacaagagaaagtaaaatcagcggttaattgaacgccaccttcgacatcagcaaattgatgtttaatttggcaaggttcagatgcagtggcattagctttagctgttagctcatttaacatcgcttcagcttgagccttatcggcaaaaacgtgctgataagatgcggtacaatttttgttgtcgataatagtaccaacatcaacacaacaacaagcagctgtttcttctgcattacaacgattaattgcgtctgccattttagtctcccaacaaaagaagtgttaattatctatcataatagcaaaaaaataaaataacctgcgttagctcaaattaacctacaattttacaaaaaaaattgattttactgtttgtttaataaacaaaaccatctttattggcatttaatgtaaaattaatgttaactaaatcccaaattttaaatcaaattggaaatatatataaaacaaacttgcaacattaccactattcatctttatacttaagcaactggtctgatttgtcataacgacaaccgcacctaaaatccagcgcttctaatcagaagttacttatttaaaaaaattatgagggtttaggtcatgaaccgtaaaaacctgtttactcgcacagctctcgctgccattgtaggaacactttcctcttatgcaagcgctgccggttttcagttaaatgaatattcaacttcagcactaggtcgtgctttttcaggagaaggcgttattgcagatgatgcgagtgtaggtagtcgaaaccctgccgcattgaccatgtttgatcgtcctgagttttccgttggtgctatccatattaatcccagtgttgatattaaaggtaaatctccactctctggcgccagcactaatgccggcgatatcgccccaagtgctttagtccccaatattcactttgttgcgcctatcaacgataaatgggcaattggtgcatcaggtactactaactttggtttagctaccgactttaaaaaagattacccagcaggtttaattggcggtaaaactgatttaaaaaccatgaacttaaatttaagtgcaggttatcgagttaataaacaatttagtgtcggtttaggcttaaatgcgctctatgctgatgctgaaattacccgccatgtaggtgaagcaggtaagctattgggtggtaccttatctcaacatccagatcctaactatcagggattaggccgttatttatcaagcttatcgccaagtgatcgctttgcacaattaaaaggggatgcttggggctttggctggaacgccggtttattatatgagtttgatgaagataaccgtatcagcttcacttaccgctctaaagtaaaagtgaaatttaaagatggtgattatcaaagtgacttaaaaacgatccctcttcctggtggcaataccatcgtaggtaccgaaggtggcacaatcaaaggtaaacttgatcttaacctaccggagatttgggaatttgcagcttaccaccgtgtcgcccctaaatgggctgtccattataatttagcttataccagttggagtgagtttaaagagttaagagcaacacgtaaaagtgatggccagcaactcttcaacaaagaagaaggcttccgtgatgcatggcgtattgcattaggaaccacttattaccatgatgataattggacattccgcaccggtattgcctttgatgatagtcctgttcctgcggataaacgctctatctcgatccctgaccaagatcgcttctggttaagtgcaggggcaacctacgcatttaataaagatatgtctgtggatgttggtttagcctatatgcacggtaagaaagtgacaattaaagagaagctatctgaaagcttaccattgccggcttatgaatttgaatcatcaggtaaagcatggttatacggtatgaactttaactatcgcttctaagctgatttgctactttaaatacaaaaaatggtcttaaaaaagaccattttttatttaaacaaccagataaacagattaatcgatagaatctaaatcatcttcaatcgcttttgcgtttggattttcacctgttttcccgccattagcatcgaaatcatttttttggaaataggcttcacgcatcattaaatatggatcagatgagttttgtaaaattgcatctgaatctaataattgagctcgcgtttcaataccttcaagggcccatttacccgcagacatccagaaagtgaggtaactcagtactggataggtggcatcagcccaatcgcccccctcttctcgtactgtaaagctgccatagcccggtaataccacataagggccatatcccacaccataatgccctaacgtactaccaaaccttacaggaacttctttttccattgactctctagacattcctgcaacatcgattaaaccaccaataccaaatacggtattgatccaaaaacgtccgaaatgcttagcccctttttcaaaatctccacgtaagatgctatttagcatacttgctggctcttcaaggttacctaagaaattcgatagtccattacgtgctggtggtggaacataatcacgccatactacggctacaggtcgtaatacgtaaggatctaaaacataatagttaaaattaaacatctggcggttaaacccttccaagggatcagaacgactgtcaccattgttaggtgtgcttgcacatcctgaaagtaaagctactaaaagagcaacaccgcacaggcgatacttcataatgttctccgctaactgtcctatgataatcagagcataggtcactattcatcatctttacatataatactgtcaataggcgataagtgatactgttattcgtttttaatcttataagaacattcgggatttatttttatccaatagagctaactatgccccattgacaaaaatattttagattgttttttatgcaaaacacctatagttacatagttcaaagaagaagtaattcgcaataatcaagctaagaattttctcaccttaaagtatctatctatataaaaaatacgctattttatttgttagtttcatccactttatatcaaaaaataaaaaaacataaagatacatatacaaatttacctatccaaataaaacataaaaataatttatcaatattttttaattataataagcaaaattagaatggattaaatatagtcataaatagataaaataaagatatcatgattaggctatcaatagctaaattatcattttcgatattaggatataatgaagaaaaatttctctatttttccttgctgacccattatatcatcaagttttaccagataccttcagctaagttacaaattaatcgagatatcaagccaccaacatacactatcaattattcctgaaaatgctaagtatgcattaggctctcaacgtagcgatattaaaacatcctgtaatgtagatacttttttaacatttacagtttcagatttgtttgtagaaaataaagctaacacatggaaaaaactttagtgtaactttagaaaccagaggagcagaaagtaatgtaatttattgatatataaatcaattaaaaaacctctaaataaaacatcgatattcctgaagaatttagattatatagagtaagctactattacatttagtttttgaatttaacatttaaacaaaatgagtaataaatatcacattataagtaagctattattaataatctctttttgatgccccactacatataaaatcaaaaagcattaaaattttcattactcattattaaaatgggcagaaataacaatataaccattaacgaaatgattatacttttatgataaaaatttaaacaatagctttacgattcattttaaataaaacattttttgatattctaaattagatgaaaaataataaaatattttcaataacatcataatttgattaaacagactaaaataaaagaaaatacttaattttaaaacttaaataataatttaaaaggggtatcataatcctctaatttaataattcattattcattcacgaaaaggaagagtaaaatgaaaaagaattttctctattttaccttactagcggctatatcaacatcagcgctagctgtaacaccttcggctcaattacagatcaatggggatataaaaccgccaacttgtacaatcaatagttctaacaatacagaagttgtctttgactatggccgcatatcgccaagcttgataccacaatcttcaaactatcaatatgtggatatgaaaccagaaacaagcatcagtattgaatgtgatgctaaaacttatttgacttttatacctactgacacatatggtgatgtagatcttgattataatactagttttgatagtgcttggtttcgcttagttgataaagccaacccagataaagctgttggggcttcattttttaattggaaagatgcaactgttgacggaaaaacggcttttataagccgagcaacacctaaaacagctgaagtaggggtatctgtcttagttaaaaataatattcatgggtggacatcagagcaacaagaggatgtatccgccgcatctcttaaattagtctcaggtgaaatctttaccacaaaatttataccaggaatatcatctcatacattcattctttctcgtgataagctagctaaaaaagcgatagatattagtaatggactcgattttattggtgaggccgtattaacattctctttcggtgtttaaaaagtttaacaaaaacactctcactatattaacaagctattagcttgtatacattaaacgggtaggagccttctttattttattcccctcccgtttattgctttaattttttatgactcattcaattaacctactaattttatatttatcatttttattacgatctactgtgacaatataaaaatatagaaatagctattaaggcagtattatcattgattacaaaataaaccttgctaactcaatgactaaataccttgatccccccaccacaaaaacggtactatacggacactgagaaacagttaagcaccctctcgcaaaatgttcccttagttaaatggatataacgagcccctcctaagggctagttacaggttcgattcctgtagggaacgccaattataacaacctatcattttacccactgtttattctcgctataaagaataggttatttattaacaacacccaatgagagtttggtgatttaataaagccttatcaaaaataataacctttattgtcgataatttggcctaaattcctatttcactgtctgcaccacagaagtaaatcaaatctatattcggtagcttatatcacctgttatggacaggagaatttaaatgatactttggctgatctcttttggcttaatttcaggtattactacatggttatttggttttggcggtggttttgttactgtgcccctactctatactctcattcttacactttgggcgggtgatagcttagcgggtgaacatgctatgcaaattgctgtggctacctctgcgctcattatgctgttttccgctattattacgaccctaaaacaccataaggcgaaaaaaatagattggaaattaattatgatcttattttgggggattgcattcggtgggatcttcggtgccttacttgcctcatccgtccaaggtgaatggatccgatggatttttattggctatctattccttactatcttagattgctattttcgccccggatttatggcgccacgcaaagaaatacaaaaagtaaccaacaaaaaagaagcgttaactggcactattattggcattattgcagcttttttaggtgtaggtggaagtgttatgaccgtacctttattacgccgtagaggtatgtcaatgactcaatcggctgcaatggcaaacacattgacattccctttagcattaacggcaacactcacttatatcttattgtctttcactaccccgttaggggatagcgctggatttgttggctatatttggataaaagcagccgttattctaatctgtagtacatggataggattaaaaatagctgaacgttttttatcacgtataccggataaatggcatgcgagagtttatccgctgttattgatattggtgttagtcgttatgctgaactaacccgctaacatacctctggacaaggcaattcttatctatctgtattgcctttaatatttcacacaaaagtgaaattgttacatttactcgactcaatagtagcgtattttgacaccctagatacaacccaataaccattaatataattaattaaaaattatacataatgaataatatattataatttatcttatcttttttatgatggcataattatctacctcttagataaattaaatcttaattgacatttaattctatcttttatagatatttcattattaaaataagacattatagcaaatataataaaatagcttctttagcttaagaaaattaaaaaacttgtttagtctttatttcaataacaatttaattacaattaaacctctcaccgatatatataaaaatacatatcgattgaaaattatatcaatattttttcttaccttaataatatattatagatacactttaaaagaataaatcattcctataaccatatgaatattaaaggcatggttgtttttttataaaactcttaattcatttcctttaacaataaccagcccctaactaatgccttagaagaaaataattatcattttattttgtctctatttgttaaattattttgtgatatttattaacttctttgttgctattatttattatttccaactaactcatcacttattaatgaataaattgaagacaccatcaaatatttatttaaccaactgtatataatatttagctataagaagaaactggaggttatatgagtattagtcgtcgttcttttattaaggggatgggtataggatgtgttgggtgtacggtgggaagtttaccaccaggggccctcgcacttaatccagtaacatctcttaagggtcagtctaaattaacaccaagtttgtgtgagatgtgttcttaccgttgtcctatagaagctcaggttgttaataacaaaactgtctttatccaaggtaaccgaaattcaccacatcaaaaaactcgagtctgtgcgagaggaggcagtggtgttagccttatttatgatccgaaacgcattgtaaagcccatgaaacgcaaaggccctagaggtgccggagaatgggaagttattagctgggaacaagcttatacagaaattgccgaaaagatggcaagcatcaaacaacattatggtgctgaaagtatctttttctcatcaaaatcaggctctctttcctctcatttatttcatttagcggcggcatttgggtcaccaaacacctttacgcatgcatcaacttgtcctgcgggcaaagccattgctgcatcggtaatgatgggtggtgatttaaaaatggatctcgcaaattctaaatatattctttcttttggtcataatctttatgaaggaattgaagttgcagaaacctatgaattaatgacggcacaagagcgtggtgcaaaattagtcagttttgatcctcgattgtccgttgtttccagtaaagcaaatgagtggtttgctatccgaccaggaggcgacttacctgttctaatggccatgtgtcatattatggtaaaagaaaatctttatgataaagattttatagaaaaatttactgtcggtttccctcaattggtggaagtattacaagataccacgcctgaatgggcacaagctcactctgatgttcccgcaaaagatattattcgcataacacgtgaaattgcagctaaagctcctcacgcattagtcatgccaggccatcgcgcaacctttaataaagatgaaattaatatgcgcagaatgatcttcaccttcaacgccctactgggaaatattgaacgtgaaggtggcatgtatcaaaagaaagctgctgcaaaatataataaattagcgggcatcgacgttgcccctgaattagctaaaccaaccgttaaaggcatgcctaaaattacggcaaaacgcgtcgatgctacagcacctcaatttaaatatatcaataaaggcggtggtattgttcaatctatcattgactccacactccatggtgtaccttaccaaaccaaagcttggattatgtcacgccataatccatttcaaacagtaagttgccgacctgatctagaaaaaacagcccaaaaactcgacttaattgtcagttgtgatgtgtatttaagtgaaagtgcatcttatgcagattatctgttaccagaaagcacttatttagaaagagatgaagagatttctgatgtctctggtttaaatcctgcttatgcattaagacaacaagttgtcgaacctattggtgataccaaaccaagttggttaatttggatggaattaggaaaaaaactggggttagcaagttattatccttgggaaaacatgggagttcgtcaactttatcaagttaaaggggatgaaaatctctataaagagatccaccaaaaaggctatttatcttatggtattccgctacttttacgtgaaccatcctatgtaaaagcctttgttgcacaatacccagatgctatcaaacatgttgatagtaacaatatgatggaaaaatctctttcttttaaatcaccaagtggtcttattgagatctattcggaagagttagaaagtctattagagaattatggtattcctcgtttccataacttcccattaaaacaaaaagatgaactctattttatccaaggaaaagtcgcagtacataccaatggtgcgactcaatatgtacctttattagcagagctaatgtggaaaaatcctgtctggttacatcctgataccgcaaaaagtcatggaattaagcatggtgatgagatcattttagaaaatagcgtaggcaaagaaaaagcccatgccttaattaccacaggtattcgtcctgacacagtgtttgtctatatgggttcaggctctaagaccggcgaaaaaacgccagcaaccacaaatgggatccactgcagtagtttattacctcatgaaattagccctgtttcaggcactgatgtacatacttcaggcgtcaaaattagtctggcttaaggaaaaaaataacgatgaatagcaactctaaacaatttgtcatgctacacgatgaaaaacgttgcattggctgccaagcttgtaccgtagcatgtaaagtcatcaatgatattcctgaaggatacagccgattacaagtacaaattcaaggccctccctcataatgatgaggcaggagatccacattaccaatttttccgagtttcctgtcaacattgtgaagatgcgccttgcgtttctgtctgccctacaggtgcttcatttattgatgaaaatggcattgtacaggttaaaaaagagctctgtattggctgtgattactgtgttggtgcttgtccttatcacgttcgatatatcaatccattaacacacattgccgataaatgtaatttctgtgctgatactcgactaacagaaggtgagttacccgcttgtgtaacggtatgtccaactgatgcattggcatttggtcgcattgactcacccgagatccaagcttggatcaaacagaaatccgtttatcaataccaattagataatgtcggaaaaccaaatttattccgccgtaaagagatccatcagggagataaagcatgacaagtatctggggagccgaactctattatacgccagattactggcctgtatggttaattgcagcaggtttgatcattgtcgccatgatagccatattggtgctacatggttttttacgttatgcactggcacctaagcaaagtggtcactatgaagaagagcgtgtttacttatactctaaagccattcgtttttggcattggggtaatgccttactgttcattcttctattaatcagtggattgttaggccatttttctatcggtaatgttccatcgatggtactactacataaaatctgtggttttattctcatcgctttttggataggttttgttgtaattaacctaaccacaaataatggtgtacattacaaagtcagaccacaaggattaattggacgctgtatcaagcaagctcgcttttatctttatggtattatgaaaggtgaaccacatccttttgccgcgactgcaacagataaatttaaccctctccaacaacttgcttacttaggtgttatgtttgggttagttccactacttcttatcacaggcgtactatgcttataccctgaagtcctaggttatggctattggatgttaaaagtacactttatattaggcatcgttgcactcatgtttatttgtgcgcacttctacttatgtactttaggcgatacttttacacaaacattccacagcatgattgatgggcatcatcgacatcaaaaacatggtgaaagcacaacaacaaaaaattgataattagcttttgataattattaatatccccatgcctgcttaccgagcaggcatttttacgtattggtatttttagctaagatcactgatacgtaaaaatacagaatattctcctattcactacgatttttttatttattattaacagaacaaaattgatatagcttaattttctaaaaatgaatctttttatgatgatattctactaaattagtatttttttgaactagctagtttttatttttactaaaattttttatatattaaaaaatataattaaccaatcttttatataaagattttttagtcataaataacagtaaaaaatagcgacaaaaaagatatgttataggtaatggtcaatattattatactaatggaataatttagatattcttattactgttaaaaaataaaaatgcccattaagggcattttatttagattcaaggcgtaaatgataataagataattcttattattaaataattagattaacactctcataagaatcatcttatttatctaattatttgtatactagctaactttctaattaaaagcttacaatcagaaaatagaaagagccttattgtcgaaatgagctgggatatgttgttcattattctcaggaacatcaaccataccccccataacatcttcaaagaagttacctatattaatgcctaacacatcaaggactttaactaagcaatcaatgtcgatacgattaactccgcgttcgtagcgaaataattgctgttcactaatatcgatttcttttgctaactgaaatacggtataaccttgagattttcttaatgattttattttttgtccaacagcgtaagcaactggatacttgttactcataatatgttctcgcttttcactttgattgatatctaatttataatagtgcgggccatcattaataatatatgaaaaaatataatatcatgggcaccttttttaattttattaaaataatattttgacttgataagagtattacaattcataacaacacttatcatatgtaaataatatactacgcatttaaacactttcaaccagtcaaaaaatgacaataataactaacacctttactctcactagttattaatacctaggagaagtcacaaatccaatattaatcaataggttataatatattaaatataaatatagtctttttttatctttagaattactcatgtattagatttatattctattaatgcaataatttacgaataaatatatcaaattgacaaaaaaataatcaataaatttcagtctaatttatttaaatttgtgaattaacctcgttaatagaacattttttacatttttacaaaaaatattgagcaatctcaataaattctaattaatacaaaatgacacagattaaaaccaatagaaacaattagttacataattttcataaagtaatagaactcaatctaattttaaacatttgttaattaatttatataagcataaacacttagcgttagagtacttattaaatttaaataaatttccaattattatttactataatttgaattataatttccgttatggattattatttatttatattttttcttgttctcttattaaagataatccaaatagaaaaagaccataaaaagaagaataaatgataaaaactattttatatcatatggttataatacatttcttaatttatagaacatctaatgttctactaaaaacatgccagcatagctttttgccaccttccgcaaaccacatatttaaacaaaagaacttcttatcagttattgtaacttagggtaaatatttgctatattaagctgttaaatgaccatttaacaatgatctcattttgttaaaaattcaaaattagataatcctttaatcctaagtgtaaatacttatttcttataaagtgtatttttgcctctctgcaaacattaatatttttatataatttatctttctgctatatacacaattttctcttttttcgtgtaaaaaaggaatttccccctttaagacaacatctaaacaaatgaaaatgtcgtttattggcatagatcattttcttttgaattcataaggatagcgacttgataaaaatcaacaattaaaataaacgtttaaaatcaacaaattaatataaaaattttgttcaaaaaatagcaccaaaaaaaacgatatttcagaaaaaacacataataatttttaattaaaaagataatttggttactaaccacataaaaatattaagggtgtttactgtaaaggataattttgaattatttttattttaacccatataaaaaccataatacgtataattaactaataataaaaaaatactttttttttaaaattaatttaaaaatcttatctatatcaaggcgataaaaaatgaatatccttgacgttgctatttttaaactatcttataagcaattaaataacctatgtgcactcaataaaagtatcatcttagctatttctctcagtaattttgctaatccttttaaataatcatttcatcatcaatatttttaacactactagtagggtaaataagtcggtaatcaacccctgatagcacaaaaataattcagaccgataaataggagaacagaacagggatcacagctcgatataaaaccaccaagtagacagatagatagacagatagacagatagacagatagatagatagataggtcgatgtagtctagtaacagacctgaatacaaaatgagcgctatggataatagataaggataatagataaggataaggataaggataaggataaggataaggataaggataaggataaggataaggataaggataaggataaggataaggataaggataaggaataataaaagaatttttatcgaatgatataaaaagaagtggtgggcggtattgggctcgaaccaacgacctcctccttgtaagggagatgctctaccaactgagctaaccgcccgcttaattattaaatggtgggtcgtgggcgactcgaacgcccgaccaattgattaaaagtcaactgctctaccgactgagctaacgacccatttaataattttacgtaaaacttgaggtagtattgtgaatggtgggtcgtgggcgactcgaacgcccgaccaattgattaaaagtcaactgctctaccgactgagctaacgacccatcacaatgttcactactctttgttgtatatttaggaatggtgggtcgtgggcgactcgaacgcccgaccaattgattaaaagtcaactgctctaccgactgagctaacgacccatacctaactgtgtgatattgcgtaaaataaccggatgaagtggtgggcggtattgggctcgaaccaacgacctcctccttgtaagggagatgctctaccaactgagctaaccgcccacttcataatgactaaattctcattaccacgctttaatgtaattggtgggcggtattgggctcgaaccaacgacctcctccttgtaagggagatgctctaccaactgagctaaccgcccaattacattaaataatacaactatcacaacgaataataatggtgggcggtattgggctcgaaccaacgacctcctccttgtaagggagatgctctaccaactgagctaaccgcccgtcgtgatggggtgcattatagggatactgcgctatgagtcaacgatttttatcggttttttatcgtaaaaatgatcgttcgttttatttttagtcaagatgctttttttagcaccataactgacacagcaattaaccaaaataatccgttgttgttacttcgtcaaacaaaaaataacctatttgaaatttttctgcaggttaaaagcttaatgccattgaggaattagcatccagtgataaaataaagcaacaatttcgtttttttgataatcacggttacttatcttctatttttggctccttatataagaaagaatataagtaaaacgtactaaggcaatctcaatgagtaaaataaaaacccgttttgcaccaagtcctacaggctatctacatgttggtggtgctcgtactgcactgtattcctggttatttagccgtcacaacaagggtgagtttgtactgcgtattgaagacaccgatttagaacgttctactcaacctgccattgatgcaattatggacggtatgaattggttaaatctaaactgggatgaaggtccttactatcaaaccaaacgctttgatcgttataatcaagttatcgatcaaatgttagcagctggtactgcttatcgttgttattgttctaaagaacgtttagagaaactacgtgaagatcaaatggcgaaaggtgagaaacctcgctacgatggttgttgccgtcacggtgatcacaaccataccccagatgaacctcatgtagttcgttttttaaatcctcaagaaggatctgtgatttttaatgacaaaattcgtggcccgattgagtttagtaaccaagagcttgatgacttaattatccgtcgtactgatggttcgcctacctataatttctgtgtagtgattgatgactgggatatggaaattacacacgttattcgtggtgaagatcatatcaacaataccccacgtcagatcaatatattaaaagcacttggtgctccagtacctgaatatgcacacgtatccatgatcttaggtgatgatggtaaaaaattatctaaacgctataacgcagtaagtgtaatgcaatatcgtgatgacggttatttaccagaagcgttattaaattacttagtacgtttaggttggtctcatggcgaccaagagatctttagcatcgatgaaatgattaaagatttcactttagaagctattagtaaatcagcaagtgcatttaatactgacaaattactttggttaaaccatcactatattaataccttacctgctgaacaagtagccgtacacctagattggcatatcaaacaacaaaatattgatactagtaatggcccatcactggttgaattgattaaattactcggcgagcgttgcaaaacattaaaagagatggcggaaagttgtcactacttttatgttgactttgatagtttcgaagaaaccgcggcgaaaaaacacttacgtcctgtcgctcgtcaaccattagaagtagttcgtgataaattatcagcaattactgattggacagcggaaaatgtacataaagcaatccaagaaaccgctgaagaattagaagttggtatgggtaaagtcggtatgcctctacgtgttgctgtcacaggtgcgggccaatctcctgcactagatgttactgttcatgctattggtaaagctcgtagcatcgctcgtattaataaagcattagattttattactgacagagaaaatcaagcttaattgagctgattatcttatttcacaacgaagagtcgtcacttatttttaagcggcgactctttttttgtattctttttcatcaatcaataaataatgtgagattaagtgattgacagcattgtgcttgttgcctattatcaagcccgttccagtatgttggggctatagctcagctgggagagcgcttgcatggcatgcaagaggtcagcggttcgatcccgcttagctccaccaatatacttttgaacaatccattatgtggggttatagctcagttgggagagcgcttgcatggcatgcaagaggtcagcggttcgatcccgcttagctccaccagaatcttaagatcctgaagagaaatcttcaggattttttattttcaccaatgtattcacttaattagtgattcacactacccgcaaagataaaactactgcgcagtatatcccccatctaccgcataaaaagcgcctgttgaaaaactactctcatctgaaagtaaaaaagccaccatattagccacttcttttcgcgttgccattctcttcatcggatgtgttgatgccatccattgacgaacttcatccggtaactgttgcattcgcggtgtgtctacatacccaggccctattgcattcacacgtataccttgctgtgcaaattccaaggcagctgaacgggtgatccctaacacagcatgtttggctgcagtataagcagaaataccggcaataccgacaataccatttgtcgaagataaattaacgatactccctccaccacttcttagtaaggccggaataccatatttcaatccgtaaaatacgccgttaatatcggtatccataaccgctttccaatcatcaatattataatcaacaatcgatgtattatgcggacctgtaatacctgcattattcactaatccatgtaatgcgcctgtttgtgctaatattgcttcaaacatgcttttaacttgctcaggtgatgtcatatctgcttgtaatgctatgactttttcacctgtaggatcgattgtgtaagcggtttttttaacctgttctaattgtcgcccacttataaagactgttgcacccgcttgatataatcgttgggcaacgccttcccctactcctgttgcagccccagtcactaacaccgttttgccttcaaaataactcatattcacctcagttcacttagtttaagtaattaactttagttaatcatgttaaataggatatttgattaactaaagttaatcaatataaattttcttcagctaaaatgagctgttattattaacttcaattaatttgatagaaaaatgtaggtactaatggagcaacttgagctagaaaatgccctatcgcttttacagtgtactctggttgcacaacgcacccgttatacaccagagcaagtaacttggggacaatatgatattttagaattattgcgtttacgcggtgatttaacgccctctcaactttgtgaaattttagctatctcacgccaaaatttatctaagtttatgcgaggattaaaatcattaggttttattgctcaggatcgttctaagaaagataaacgtgaattaattacgcatttaacagatgaaggtaaagcttttttagcaagagccgctttaggccgaaaacagaacgcacagaagctacaagcgcaattaacacctgcagaacaagctatgtttattgaattgagtcataaagttattaacgcactaatagcggataagttacctacagagcctgattaatgcgactgctttaatggttttagtaacccttctaagccatcaattttaattgctagggtcatttccattagttgccctagctttccttcagggaaggtgcctttcttggcaaaccacaataaatactcttcaggtaaatccaccagcattcgccctttatatttaccaaatggcatttgtgtgttggctatatctataagatgctgtttttctagcatgatctctatcgctttatcgagaaggaatgataaggattataaggtaatttaacgataaaaaaagcagtaccgacgggtactgcttgatttatgttacatgataactaagttatccatcttacattgttatttatttcacatgctatctgtcttatctcaatgattaaacaaacaggcctgtgatagcagcagataagaagctaactagcgtagaaccaaatagtaatttaagaccaaaacgagaaaccacattaccttgcatttcgttcagacctttaatagcccctgcaacaataccgatagaagagaagttagcaaatgagactaagaagacagataagatcccaacagagcgaggtgttaattcagcagccagatcttgcaagcttcccatcgcgacgaattcattagagactaatttagttgccatcacactacctacacgtaatgcatcttgctcaggtataccaatcacccatgctaatggatagaacacataacctaagcaatcttggaaactaataccgaaaatcatactaaagatagcgtttaccgcagcaattaatgcgataaaaccaatcaacattgccgcaacgattaaagcaactttgaaaccagctaagatatattcacctaacatttcgaagaagctttgaccttcatgcagattccccatctggatatcttcttcattttcaacagaatatgggttaatcactgataggataacgaaagtactgaacatattcagaaccagtgcagcaacaacgtatttaggatcaagcatagtcatataagcaccaacaattgacattgataccgtagacatcgctgtcgccgccatagtgtacatacggcgctgagacattttgcccaatacatctttataagcgataaagttctcagattggccaagtactaaggagctaaccgcattaaacgattctagtttccccataccgttcactttggacagcactgtaccgataatgcggatcacgaaaggcaatactttgatatgttgcaaaataccaattaatgcagaaataaagatgataggacataatacattcaagaagaagaatgctagaccacctttcatcataccaccgaagacgaactcagtaccttgtgcggcataacctaataagtgatcaaatagcccagcgaaaccacggacaaagccttcaccaatatcagaattgaggaagaaccatgccaatgcgatttcaataattaataactgcacaatataacgcagacggatccctttgcggttattacttgcaataaatgctaatgcaccaataactgcgagagccaaaacaaagtgaatgatagaagacatgcatgctccaaaaataaaaataaatcttggagagcattttatgtaacgcgtaacattacgatgtgattattgtcacaatacagtgaaaccatatacacactatttattaaataagataggttgatcacactttaggagtaacttaagtaacacgaaatgtgaatttagcttaaattaaagatgctactgagaactgctctcaatagcatctaagtttattgtaaacgattatttagattgatcaagcaagcggatcatttcgtcttcatcaataacagtaatacctaattcatttgctttggctaatttagaacccgccgcttcaccagcaatgaccatatctgtctttttcgaaacactaccactcacttttgcaccaagtgcaactaatctatcttttgcttcatctcgcgttaattgagaaagagagcctgtcagcacgactgttttaccagcaaaaggattatcacctgcttcatgagtagccacaaccggtgccggccaagtaatgccaatgtcattaacaagttgatcaatcacatttttattatgttcttcttggaaaaaattaaccacatgctttgcaacaatatcacccacatcaggaactgcctttaaggcttcaatatttgcttcacgtaatgcctctaatgaaacaaaatgagcggttaatccattggccgttgcttctcctacttcacgaataccaagggcatagataaaacgggcaaaagtggttgattttgctttttctaatgcattaagcagttttttggctgatttctcccccatacgttctaaaccagataagatcttttcatctaaacggaataaatcagccggtgttttgacatactctttttcaaccaattggtcgataattttatctcccatgccgtcaacatccatcgcacgacgagaaacgaaatgtttaagcgcctctttacgttgcgctgcacaaattaatccccccgtgcagcgggcaacagcctcaccttctatacgctcaatatcagattgacaaatagggcattgggttggaaaaacaatttcttgtgcattctcagggcgtttttcttcaatcacactcacaacctgaggaataacatcgcctgcacggcgaataaccaccgtatcaccaatacgtaatcctaaacgttcaatttcatcagcattatgaagtgtggcattactgactattacccctgccacttgtacgggatctaaacgagcgacaggtgtaatcgcccctgtacgccccacttgaaattcaacatctttaatcaccgtcatctgctcttgggcttggaatttgtaagcaatcgcccaacggggagcacgagacacaaatcccaactcttcttgtagagctatatcatctactttgataaccacaccatcaatatcaaagcctagattagggcgaatttctgctacatgatggtaaaaatcaagtacagctttagttccggtacataatttaatagcatcactaacaggtaatccccattttttaaattgctgtaagcgtgcataatgacttgtcggtaattcaccgccttcaagcacgccaacaccataacagaagaaagtcaaagggcgcttggctgtaatacgaggatctaactgacgtaatgaacccgctgctgcattacgaggattagcaaatacttttcctcccgtgcgtcgagcttcttcatttaaatgctcaaaccctttttcagtcataaagacttctccacgaatttcaattcgtgcggggatattatcgccatataaacgcaaaggaatggctttaatggttctgacattctcagtaatattttctccagtggtaccatcaccacgggttgcagcttgtactaagcgaccattttcatacagtagacttaccgcaagtccatctaattttaattcacaacaaaaagtgatctcttcattatttttcagacgttcacgtaaacgtttatcaaatgctaaataggttgtttcatcaaaagcattatctaaagagagcattggaatttcatgtctaacttgctcaaaagccgttaaaggtaatgcccctacccgttgagtaggagaatctggggtaatgagttcaggatgttcggcttctaatgcttttagcttattcattaagcgatcgtattcagcatcaggaatttcaggtgcgtccatgacatgatagagatattcatggtgacgtagtgtaacgcgaagttcatcaatttgttgttgaatattttgattcatgaggtatcaccaaagaaagaaaagcccccgcaagcgggggctgaggttgttggcaatgtgagaaaaaccaagtttccccactttgtattatcagccgaaaatcaagtcattaattttcctgatttctttaaatctatccaacctagcaccgcaagcgagcttttgataaaaagactattgatgtaaatctagtgttctacgaattctagatttataaagttcaattttttgtggtgttaacagtttgcgctcttcatcaagcacaacaccgcccacatcagaggcaatacgctgagctgcttgcaacatcaatttaaagttttggttagcatcaccataagatggcaccatcataaacatggatacgccaggcgtggttaattcagccatcgtatcaatattgaaagtacccggttttaccatattggcaagactaaacaatacagggccattacccgtcgggttaagatgtcgatggaaaatattcatcgcaccaaactggaaacccgcttgaataatgctctgcattaacacctcaccgtcaagcatttgaccatgatgagcgctgacatttaatactaataccagctcttcttctgcttttggctcttctgttccggataaagcttgctcagcttgtttcacatcagatgaggtttcagcatccaatggcctatctgtatcagtggtatgtatttcatcactagcaacagagttcgacgatactggcactggctctacatcggcaagttttgtctcactaatatcaccttcttttacatcagcatggtttacctctacctcgggtatcggttgtttttgctgaggcgcagagtcattattttgttcaataacatcaaaaacaccaagactaggctctcgttgtaatgaagtatcgttagaatgtccctgtgctggtgttccagacataagtggatctttatctgcaactgaggattgtggcgcaagtgttggctccgatttaaccggtggcacactttgagcctcctgcgttgaagttaaagacgacatctgatgatttgcctcagtatactggggttcatcatcgttctcatctgactgataattctgtttctgacgttttactgggcgattacggaaaagcttagaacgctcttttcgaccaatccataagccgtgtaataacaaagctatgattaaaatcgcaccaacaacgattaatatcagacgcaaattttgctgcatcatttctatctctgttgtcttgaggtttaatagccacaatggcgaatattacttttactaagagtatttgccaatgcttataagtgcaagccaatacttaattttcttgtcacaaagatacactcttcaataccttatgcgcattttttagacaatttatcactagtaaggctgattatctctctatatgatactagcttgcccttataggagagaataggaagtatgacaaatttgacagaatcgaccaaaaatttaaatggatttcactattttgcacttgggtggcgattaattactcgcccgggtctaaaacgttttgttattttacccttacttgccaatattattattctcggtagtgccttttggtggttatatggccagattggtgaaatggtcaattggatgatggaaaaagtccctgattggctacagtggttaagctatgttatctggccactgtcagttatttttattttgctggtctttacctatttctttagcaccatagccaatattatcgcttcgccttttaatggattattagcggaaaaattagaaggccaaataacgggtattaatcctccggataccggcttattaggtattacaaaagatattccacgtattttaaaacgagaaatcatcaaggtcgtttattatttgccaagagccattgtattgttattgctctattttgttcccgttgttggacaaactatcgccccaattctttggtttatatttggtgcttggatgatggcaatccaatataacgactttccattcgataaccataaagtctctttcgccaatatgaaatcaacgctgaaaaaagacaaatggaacaatttacaatttggtatggtaattaatatcttcactatgatcccaatcttaaacctagtcattatgccggttgcaatttgtggtgccactgccatgtggtgtgatcgatatcgtcatcaacatgtacaagcaggccagtggtaataccactggtttcattgtgattagaatcttttggaataaaaagtaaaaaaagttataaggatattcataaagcttatttccatcttttgcttgatggcgtatggtaatttcatctgaccttataaaaaatcatgtaccgaggataaaaatgagcaaaattttcgaagataactcgcaaactattggccatacccccctagttcgtttaaaacatttcggtaatggcaatatcttagctaaagtagaatctcgtaatccaagctttagtgtaaaatgccgtatcggtgcaaatatgatttgggatgcagaaaaaaaaggtatcctgaaacccggcgtagagctagttgagccaaccagtggtaatactgggattgccttggcttatgtagctgctgcacgtggctataagctgacactgactatgcctgataccatgagtattgagcgccgtaaattattaaaagcattaggtgctaaccttgtgttaactgagggcgctaaaggtatgaagggagcgattgataaagcgaacgaaattcgtgatagcgatcctagccgttaccttctactacaacaatttagtaatccagcaaacccagaaattcatgagaaaaccacaggccctgaaatttggaatgacactgatggcaaagttgatgtagttatcgcaggtgtcggaacgggtggtaccatcacgggtattggtcgctatttgaaaaatactcaaggtaaagctgtcaccatggttgcggtagaacctaaagattctcctgttattagccaagcattagcaggtgaagaaattaagcctggtccacataaaatccaaggtattggtgcaggttttatccctgaaaacttagagttatcactattagatcgcgtgatccaaattactaacgaagaagcatttgaaacagctcgtgacgttatgaccaaagaaggtattttagcgggtatttcatccggtgcggcaattgcggctgcagtgaaattagctaaagagccagaatttgctaataaagaaatcgtagtgattttaccttcttcaggtgaacgttatctcagcaccccactttttgctgatatctctgacagctaaatcgcgtcacctaaaatgtaaaatttttattaaaaaagcaccttcagggtgctttttttgtggtagagatcaaactttgttatccagataggtgatttattctgtcgagtttagtatttaatcaagtaattatttcgaaggtcgaaattaatcagaaaataggcaagtgataaaaacagcactgctttcaatttctggggactatttttatcggataacgtaacatggcttatattatctgatattgctacgcaaagcaggacaatttcatctacacttactaagtcctgacttaatgtgaataattgagttataaaaggaaaaaatcctatgtaccagcaagaagttactattacagcaccaaacggcttacatactcgtcctgcagcacagttagtaaaagaggctaaaactttctcttctgatattagccttatttctggtggtaaatcagccagcgcgaagagcttattcaaattacaaactttaggattaacccaaggtactgtagtcactatttctgctgaaggcgaagatgaaaaacaagcagtagaacatttagttaagttaatggctgagttagagtaatccagttacctttcgctattcattaacgtcctattttcccctgaaaatcgctcaggggaatttataactcgatgattttaaaacagcagtgtctcttgatcctatttttttaaaattatcaccagcaagtcgtaggataaattatgatttcaggaattttagcttcaccgggtatcgcatttggtcaagctcttctacttaaagaagaacctattattattagccaacgtaaaatccaaagtgacgaagttgacacccaaatcgaacgttttaaagatggtcgtaataaatcagcgcaacaactagaaatcattaaagcccgtgctgaaaaaaatcttggtgccgataaagctgagatttttgaaggccatattatgttattagaagatgaggaactcgaacaagagatcatatccctcatcaaaagtgacaagaaaaccgcagaagcagcggttcaatctgttattgaagatcaggcaaccgcattagaagccttagatgatgagtacttaaaagagcgtgcggctgacgttcgtgatattggtaagcgcttaatgcgtaatatcttagagatgccaattatcgatttaagtgctatttctgaaaaagtgattttagttgctacagatttaacgccatcagaaacagcgcagcttagcttagacaatgtgttaggctttatcactgacttagggggtagaacatcacacacctctatcatggcgcgctctttagagatcccagcgattgttggtacatctaatgcaacagaaaccattaaaaaagaagattatctggttcttgatgcgattaacaataaaatcattattaatccttctgatgaagagctcgaagcattaaaggctatcaaagaagagtacctacatgaaaaagaagagctggcaaaactaaaagatttaccagcaattacccttgatgggcatcaagttgaagtttgcgctaatataggtactgtacgtgatgtcgcaggtgctgagcgtaatggtgcggaaggtgttggactctatcgtactgaattcctatttatggatagagattccttaccaacagaagaagagcaattccaagcttataaagctgtggctgaagctgtaggcagtcctgcggtcattatccgtactatggatattggtggcgataaagacttaccttacatgaatttaccgaaagaagagaatccattcttaggttggcgtgcaattcgtatttgtcttgaccgcaaagagatccttcatccacaattacgtgctatcttaagagcgtctgcttttggtaaactacgtattatgtttccaatgattatctctgttgaagagatccgagcattgaaagcggaacttgaaatactgaaaagccagcttcgtgaagaaaataagccttttgatgaatctatcgaagttggtgttatggttgaaacgccagcagcggctgttatggctcgccatatggcaaaagaagttgactttttcagtattgggactaacgatctaacacaatatactctggctgtagaccgtggaaatgagctgatatctcatctatataatccaatgtcacctgctgtacttaatctgattaaacaggtgattgatgcatcacacgctgaaggtaaatggactggaatgtgtggtgagcttgccggggatgaacgggcaacaatgttgcttctgggcatgggattagatgagtttagtatgagtgctatatcaattcctcgcatcaaaaaaattattcgtaacgccaattttgatgatgcaaaagcactggcagagcaagcacttgctcagccgactgcaaaggaattaatggacttagtagaaacttttactaaagaaaaaacactgtgctaataacgttagccagagcccggtcccaactaaaataattaggagaagattcatgggtctgtttgataaattaaaatcactggtttcagaggaaaagaaaggcagtggcacgattgatattgttgcaccactttctggtgaaatcgtcaatatcgaagatgttcctgatgttgttttcgctgaaaaaattgtaggtgacggtattgctatcaaacctgctggtcataaaattgttgcaccagttgatggtactatcggtaaaattttcgagactaaccatgctttctctattgagtctgacaacggtatcgaattatttgtccacttcggtatcgacacagttgaactaaaaggtgaaggatttaaacgtatcgctgaagaaggtcaacaagttaaagtcggtgatactgttttagaatttgatttagctgttttagaagaaaaagcaaaatcggtattaacaccggttgtaatttctaatatggatgaaatccaaggtttaactaaaatgacaggcccagtaactgttggtgaaaccgttgtaatgcagatcaaaaaataatttttaatctgttctcacttttaaaccgccacatttcctctgtggcggtttttatatgcaagcgaatgagctttaacgagcgcagaaaactcaaccaaacaccccagttgataaatagcgatcgcctctatcacaaataatcgccacaatcacagcccctgggttctctttagcaacgcgtattgcaccagctacggctcccccagaactaacgccacagaatataccttctttactcgctaataggcgcatggtttgttctgcttctgtttgggacatatctataacactatcaaccaactcttttcgaaaaataccgggtaaataggctggagaccaacgacgaatacccggaatttgacttttttcttccggttgtaaaccgacaatttttactgtgtccgattgtgtttttaggtaactccccaccccagttatcgtacctgttgttcccatgctagaaacaaaatgggtaatacgcccttgagtctgttgccaaatttcagggccagttgaagtaaaatgcgctcgagggttatcggggttattaaactgatctaataccttgccttcacctttacgctccatttcttgcgctaaatctctcgccccttccataccaatttcgcggctaaccaaaataagctcggcgccatacgcttgcatggatgcttgacgctctttactcatattttctggcattaataattttagtcgataaccttttactgccgctatcatcgctaaagcaatccctgtattaccactggttgcctcaattaatgtatcgccaggtttaatttcaccgcgtaattcagcttgctcaatcatcgataacgcggctctatctttcacagaacccgccggattattgccttcaagcttaacccatatttctgcatctaatccttgtgaaagtcgttgtaatttgaccaatggtgtattaccaataaattgttctaagcctgccacaataaatccctgatcatttatttgtttgtattaatgaagaaatcatatttaacttattaacgcaataaaattaacattttttaatagattttattctttttcgtgcaatagcctgtatagtcagttttactcaatagccaaaatacccatgcaaaaaaatctgcatgggcagtcattaactgtaataaaagaataatgctactttttaattaagctgtgtatgccagtgaaactgttgttaagggacgatcttgtgcatataaccgcgctttcgcaccgcccatatagtaaatatcacctttatggggtattgatgtcatatcattccataccgcgctaattggcgtatttccccattcaataggctgtaaaaccaattgccaatagtgtcctttaggagtcacttctattactttgacgggaagtttacataagctatcactatgcgggctaagtgagatttcccaaggacgtaaaaaaacatcaactttgccttgatagagcggcgtaaccgataaaggtaagtgatagccagcaatttgtaattgcgcaccattaatttcaccttggagatgattaacatctccgagaaattctaaaacaaagcgactttcaggcgtgtgccaaacttgttgcggtgtacccacttgttcgattttgccatttcccataataacgatgcgatcagcgacttccattgcttcttgttgatcatgggtgacaaaaacactggtaaatttaagctcactatgtaattcccgtagccaactgcgtaattcagttctcactttggcatctaacgcaccaaaaggctcatcgagtaataaaatttgcggctctacagccaatgctctcgctaaagctacgcgctgtttttgcccccctgaaagttgtgcaggataacgctgtgctaaatgaggcagttggatcatctctaataattgcgtgacttttttatcaatcgcggctttgttaggacgttcgcgacgtggtaatacgcttaagccaaaggcaatattttcaaataccgtcatatggcgaaacagtgcatagtgttggaaaacaaacccaactttgcgctcgcgggcatgtaaacgactgacatcttgccctgcaaaacagattttaccttccgtttgatgctcaagtcctgcaatgatacgtaatagagtagttttacctgagcctgatggccccaatagcgccatcatctcaccggaattgaccgttaaattcacgtcatgcaacacttcagtgcgatcaaaatattttgtgacatgattaatttcaatactcatattttgcccctgttttgcgttattgctgacgttctaaatgccattgcaacgcacttttaaccattaatgtaataattgccatcatggcaagtaatgctgctgccgtaaaagcccccacagtgttgtagtcttggtgcaaaagttcgacctgtaaaggcagtgaataggtttcaccacgaatagcccccgagacaacagagacggcaccaaattcccctatagcacgtgcatttgttaaaaccacaccgtagagcaatgcccaacgaatattaggtaatgtcactcgccaaaacattttccaactactggcacctaataacacagcagcttcatcctcttggcttccttggctcatcatcactgggacaagctctctcacgacaaaaggacaagtgacaaataccgtcactaataccataccgggccaagagaacattaactgaatatcgaattgttccaaccactgccctgcccaaccattgctaccataaaaaagtagatagagcagtcccgcaacgacaggggataccgcaaatgggatatcaatcagcgtcattaaccactgacgccccggaaaacgaaaacgcgtaacaagccatgccatactaataccaaacaacatatttatcggtacagtaattaaagcgataagtagcgtaagccaaacagcatgtaacatatcgctatctagcaagttgtcggtaaatatttctatgccttttgaaaacgcagtcataaagatccacgcaataggcaccactaaaaataaaatggataacacaacgcctgtaaggatcaatccccattttacccaatcaatttggcgacgataaagagagcgttgttgcgctatatccgacattagtgcccccttaatcgcttgccaaagcggctttgtaatccattaattgaaaacagtaagactaatgaaaccaataaaataacagaagcgaccgcgctggctgcaggataatcaaactcctgtaatcgaataaatatcatcaaagaaaccacttcggtctgccatgcaatattgccagcaataaaaataacagcaccaaattcccctaaactacgcgtaaaagagagcgcagtaccggctaataacgccggagacaattcaggtaacataactttacggaacgtttgccaacggtttgcccctaatgtttcagccgcttcttcatattcagggcctaactcttctaaaacaggttgcactgttctgaccacaaacggcaaactagtaaaagacatcgccacagcaataccaatccatgtattgatcaccttgatatcaaacttatctaacaccaagccataccatccttgtgtagaaaacaacgttgctaaggtcaatcccgctaccgctgtaggtaaggcaaaaggtaaatccattaatccatcaagaaattttctgccggggaaacgatagcgcgtaatgatccacgctaataacatgccaaaaatagcattaaaaatacttgcaacaccggctgacaacaaagtgactttatacgctgccacgatttgagggtgggttatcaccgcccaatattgtgcccaactcatttcagataactgcacaaccagcgcactcataggtagtaataagatcaaacaagtataaaaaagcgtactacctaaactaagcccaaatccgggtaatactcgcttgctggctgtggcaaacattattggcgtccttctaataataatttatctagcgtgccatctgtagcaaaatgcgttttcatcacttggttccaatcaccaaacacatcttcaatggtaaataatgaagtcgctggaaattgatctgcttttttcgccatcaccgctttatcatttacgcgatagttaaattgtgtgatgatctcctgcgctctcgggctatataaataatttaggtaagctttggcgaggttttctgttttattgcgttgcacatttttatcaatccatgccacaggaaactccgctaaaatatctacaggagggacaataacttgataatcatcttcaccatattgctggcgaatattatttacttcagactcaaaactaattaaaacatcaccaagtccacgttcaataaatgaggtcgttgccccccgtcccccggtatcaaataccgcaacatttttaagtaactttgtcatagcatcacgggtttgcgcttcatttccataagctttttcaaacgctccccatgcggctaaataggtataacgaccgttacctgatgtttttgggttagggaaaaccactttgacatcttcacgggtcaaatcttgccaagaagtgatatttttaggatttcctttacgaaccaaataggccattgtggaataataaggtgagctattattaggtagacgttgttgccaatcagcaggaataagcttgcctttatcatgcaaaatttgtacatccgtcacctggttataagtgacaacatccgcaggtaaaccttgtaatatggctaatgcttgtttagaagagccagcatgcgactgtttgatagtgactttgtcatcaggatgttgagcatcccattgggttttaaaatcactattaagctgtgtaaataactcgcgagcaatatcgtaagagctattaagtaattgagctgcatttgcataactactcgcaaccaaagacaatgcaacggttgcctgtaatgcaaaagttcggattgttttgttcttcattatagtacccatcagcgtaagtcttattctaatggttactctatcggctttatttataacagtgtagttagcttttgttatttgatataactaatagctattataaatggataaagagtgagattgcccaaataaataagcatcataatgatttaactgaaaataattcaacattgagatatcgagaaacaacctcgtcaaaataaaaacgccagcatagtaaatgatactggcgtggcaaaatagtagtgtaacgctaagacttacagagcggctaatacttcataagaaggagcgaaatagtagctacctgtcacaggtttactcatacgcagtaaatcatcgtatttaccatcaacttcaccaaacatactgagtaattgctgttcaatattatataaacggccacagtaggctaagaaatagaggccatgtttaccactagcagttccataaggtaagctatgacgcaaaatcgctaactcttcaccattttcttcaatagcaacacgggatacatgagaggtaatattgcgttctgattcatccaactcaatgctctcttttttagtacgaccaatcattttttcttgatctgattcactaaaacgcgcccatttttttaggttatgctcatagcgttgaaccaaaacatagctaccaccagcatcaataccttcattaattaaagcaacaccatagcgctcgtcaccaactggattttctgagccgtcaataaaaccactaagatcacgctcttcaatccagcggaaaccgtggatctcttcttctatttggagcacgttaccaaaagcagctattgcagcttgcgctaatgagaaattcacatcatgacgcatggattggatatggataagcatatcgcgctgagtcgcaggagctaaccctttgcctaatggacgaaatggctttaactctggcgcactattgttatctgataattttttccaaagatctgaaccaaaagctaccacggcacctaatgaagcatcaggatactgtttttgtaattcactaagggattgcataaattgttggcagccttgacgtagttgatcaatttcccccaccaccattgcttcaataaatagaccgaatttactatgtgcgactaaaataccgctttgtgcatgagacatattgcttccctaataaataataaaaaacatataaattaatgtggtttattatatccaacatttatttttaggctttgctatttaacaaatttttgttagcagaaaaggtaaatataaaattattttattaataacacttaaaaataacctatttttgccaaacaatttgtgttacctgccaatttgctaatgtttcatcgggtggcatcagaccatcagggccatcccattgcccagcaaaaacatagctcactgattttgcttgttctgattggcattgaatggttttttgtttatcgattttcggcccgttactgcacataccaaatgcttttttataaatatctttaaatggtgtacctattgtcgttccccacgctgttttcgcattaggatcagataccgtgattttatctactgtgcccttttcttggccataaaaagccacttgtactttttcatcttcaagtgcttgcacaataactataatattgccttgttgcatttccattccttgtcggtaatggaaacggctacccaactctttttcgatcgcttgctccgtcactgccgttgaagcagtgatattacctaatccatttgcagaaaccgttaacgtctcatttgagaaccaattcattggattaagtgcagaaaaagacattccccccatggatgaacagccacttaatagcaagacacttgtgcttaagcacaagggtaaccaaaatttaggcattataaatactccatttcactttttcgttataaattcaattgatgctaaggcaacaagtttttactcgcataaaactaaaataactgaatacttcagactagttacgaccataactcagccaagtttgttcccttaaatcgacaatatcagattttatccagtaaataagcaaggttaagttcttttttatcgaggcaacatcatgataggaaagaaagtacaaaaaaagaaaatcctctctattaaccgattaaaattatcttaacagtcaataaaagaggatttagcgaagaattaaagatcgaagtcctgatcgataattaggcgtttagtgtaagccgtattctcttgattttgatcttcatagagaagcttttcaaacatacaaatagtggcatcgttctcttcggggatcattaaagtaatttgtggacacccttttgcaatgagttttttctctagccgagagattagtgcattggcaattcctctaccgcgaaactcaggatgaacgcccaaatagtaaagcgagccacgatgaccatcatagcctcccattacactaccgactatttcgccagcaacctctgcgattaaaaagagatcgggggagtggttaatctttcgttcaatatcaatttcaggatcattttctggtgagatcaagtcgcaacgttcccaaagtgtaatgattgcctcaaaatcatcttgacggaatacacgtatttccattgttttgcctgttatctttcacaagttactaaatttattatcccttgtttactttatcaatcaacttcaaaatgagagcataggtcatatcgcgttccatttttaataaatatgataaaaactgtaggttattatgagtttacctgatattcatcgtgtgcaatcattttttttgtcgttgcaagatagtatttgccatgctattgaaaatatagaccaaaaagcaacctttcagcaagataattggcaaagagaagctggcggtggtggtcgtactcgaatgctcacccaaggtgctatttttgaacaagcgggtgttaatttttcccatgtttatggagatgccttacctgcatcagccacggctcatcgccctgaattaagcggtcgtcgttttcaagcaatgggcgtttcattagttattcaccctcttaatccctatattcctacttcacatgcaaatgttcgtttttttattgctgaaaaagagggagaagatcctgtatggtggtttggtggaggctttgacttaacgccttattatggatttgaagaagatgttatccattggcataaagttgctaaatctgtgtgtgatccctttagccaagattattatgctcgatataaaaaatggtgtgatgactatttttatttaaaacatcgtaacgagccgcgtggcgtcggtggtctattttttgatgacttaaacactcctgatttcgatcactgttttgaatttgtacaacatgtcgggcaaggctacctggatgcctacttgccgattgtcgaaaaacgcaaatctataccctggggagagcgtgaacgccaattccaactttatcgccgtggccgttatgtcgagtttaatttggtttgggatagaggcacgctatttggtttacaaagtggcggacgtactgaatccattttaatgtcaatgccaccattagtgcgctttgcatatgattatcgccctgaacctaatactcccgaagctaagctgtatactgattttttaattcacaaagagtgggtatagcagttactgacgcattaaaactaaagccatttatttattataattggctttagtttggtaaaaattactgctttattaattagtcattaaataaaaaggcgagtaatccagtcactttatttttattttcccacccctctcctctcatacaaatatcaaaatactgtttacgctctgcttcattggcatcataacgagaataggaatgataatttgaattaggaatagtaacttctttaccatctactgttatcgttgaagaagaaggatagctataatttggcgttgaactcaaataatgctcagggtagcgttgttttgcttcttgcatgcatagatttttagcgatatctaaaggtgtgggatttttcatatttacttgccatttttctggggtggcacagccagaaagtaaaaaaatagcaaaacccatagtcatttttttcaaagtaaaaaactcattaatacgaatagtaatcagttacaatttaactgttttttgaaaaaaatacttaatttttgcttaaattgtttcgatttcttttatgaaagtatgaagaattcatcaataattaataaaaaaactgagtccagtgaaacgaactcagtttttattctacatttaactggctatttaatttattttgatttctttaaatgagccattaaacgcttacgtttacgtatttgcgaagctgttaatttatttttcttatccgcataagggttttccccttctttaaattgaatacggataggcgttcccatcacttgtagtgtgcgacggaaataattcattaaatagcgtttatagctatcaggtaaatcagacacttggttaccatgaataaccacgacaggtggattatatcccccagcatgggcatatttcatttttacacggcgtccacgaataagagggggttggtgatcatcctctgccatcttcattatgcgcgtcaacattgatgtaccaacacgacgtgtcgcgcaagtataggcttcttgaatcgactcaaacagattaccaacaccactaccatgtaatgccgagataaaatgaacgcgggcaaaatcaacaaaacctaatttgagatcaagcatatctttaacttgttcgcgatcttcttgggtcataccatcccatttattgacagcaataactaaagagcgtccagaattaagaatataacctaataaagagaggtcttgatctgaaatcccctcacgagcatcaataacaagtagtgcaacattacaatcttcaatcgcttgtaatgttttgatcactgagaatttttctaccgtttcttttacttttccgcgtttacgaacgccagcggtatcaataaggatatactccttaccatcacgctccatcggtatgtaaatactatcacgggtagtgcctggcatatcgtaaactacaacacgctcttcacctaacatacggttagtcagagttgatttacctacattagggcggcctacaatagctaatttaacaggaagtgttgtcggatcgaaatcatcctcttcttcctcttcttcttgctctttctgctctgcttctaaagcagcccaataagcggcattctcttcttcttctgttaattctttctcttcttcgacgaatttacccacaataggtaacaacgcttgctcaatcagttgagaaacaccacgaccatgtgaggcagcaatagggaatatttcccctaatcctaaagagtagaaatcagccaaggcggtatcaatatcgataccatctgttttattcgccactaaataggtttttttctcaacaccacgcaagtgtttagcaataccttggtcggcaggcattaatcctgctcgcgcatcgactaaaaatagcacaatatcggcttcttgaatggcttgcagtgattgtgatgccatatgggtttctaccccctcttctgcaccatcaataccaccagtatcaatgataataaattcttcaccgtctaattctgcacgaccatatttacggtcacgggtaagtccaggaaaatccgcaactaatgcgtctcttgtgcgtgtcagtcggttaaataatgtggattttcccacattagggcgccctactaaggcaataacgggtatcattttttgatgcctcataaaaatacaatcataaatctgatggtattttacatgtaaatactaaaaagacgaaacggctcctttaaaggagccgtaaaataattatatttgtcagtgcttaattaccgacgatatagataaagtttaccgtcacgtgcttggatcatcagtttatcttgaacagcctgtggacggcttaataaacctgagctattgactttattttgagcaataaatttgcctgtactggtatcaatccaatggagatagccttctgcatctcccaccactaaataaccatcaacgatagccggggcggttaaattacggtgcagtagatcttcttgtgtccataatgtcacaccatcagatttgcgcacagctaaaactcggtcattttggtcgacaaggtatagattgtcacccaaaagtaccatgtcattaactgaacctaaatcacgtttccagatgatctgccctgaacgcatatctagactgactaaattaccgttgtaagccatggcataaacagtattttcatcaataattggcgtaatatcgacatcatttaagcggctgatctcagtagagcctttcacttgtgaaatattttgctgccaaactaattgcccttgagataacaccaccgcactaacacggccattatcagcgcccacaatcgctgcaccataagcaacagccggtgctgattcaccacgtacggataatgatggtgtatctaagttgaccgtccatgatacttcacctgtcagcaaatcaagcccttgcaacataccgttactggtatgaataagcactaaaccatcactaacaacaggtttggaaatcgcttctccggcaacatctgtttcccaatcaatagagccatcatctgtatttaaagcatacacttttgctttttctgtgccgacaaaaacacgagtaccagagacggttaaaccaccggaaagtaatgctgattcattagaggagaagaaaccttttttagttgagagatcttgagaccaaatctctttacccgtttctaattctaatgctttaactaccccatggcgatcagcgacatacacaactgaaccatcccatgctggtgacaagtgggaatagtattttccaataccattgccaaccgatttgtcccacaccacataaggggtaaattggctctgcacctcaggcaatggagacattgtcacattatcctgctcactagaacacccagctaataatgctgatgctagtagaccgatcaggagagttttacgcagttgcatgtctgaagatccctttaattggataaattattgagtttaagttcaaccaatgagcgaatagcgcctgcattttcatcattcaatgcattacgataagcggcggctgcacctgcgttatcgccttttttcgctaatacatcaccacggatataatttttcattccatcccatgctttacttttcacttgctctaatgaaattaacgcagcatcagttttatctaatgccagttgcacacgagctaagcgaaggttaagcatatctgcaaatgcttcattctttaccatagatattgctttagtcaggtgagtttcacctttggctaaatcgttggcatcaattgctaattgagctaactctaaagaggctaaagcaccataaatatcgttagtttcagaaacaaatttttcggctaatgcgatattttcaggcgttggtttcgttaatgcttcatttattgttgcaaattcacccgcactttcttgtagacggttggcttgatgtgattgccaatatttccaaccccaaattccacccacgccaatgacaatagcgagaatgatcgttaaaccataattttttaaaaactgtttaattgcatcaacttgttcgttttcggtgctataaacttccacaagtctctccttaacctaataacagcgtcaattgttgggccagttcgctacgcgatacaatggtctgttcacctgaacgtaaatctttcacggctactgtgccagcgttaatttcatcttcacctaaaattaacgcgattttagcaccatgtttatcagcacgtcctaattgctttttaaaattgcctttaccgtgattggtcattaagcgcaatgtaggtaattgatcacggatttcttctgccagcattaatgctgcactttggctattatcaccaaaagacgcaaggtaaacatcagcgacatgagtatcagcaacaaactcaggattaaccgcttgaactaataagatcatgcgctccatccccatggcaaaaccgaccgcaggcgttgggtgtccacctaattgtttcactaatccatcatagcgaccacccgcacataccgttccttgtgaacctaatgcactggttacccattcaaaaacagtacggttataataatctaagcctcggactaaacgctgattaacacgataagtaatacctacagcatcaagtaatgcacataaaccatcaaagtgttctcttgattcgtcatcaagataatcgaaaagttcaggcgcatcattcaataaagtctgaatttcaggatttttagagtctaaaacacgtaatgggttagaatacatacgacgtttgcaatcttcatctaattgatcaacgtgttgctctaaaaatgcgactaatgcttcacggtattttgcccgcgcttcgagtgaaccaatagagttcagttctaaagtcacgtgctctgcaatacctaaagccttccaccagcgtgccgttaacataatcagttcagcatcaatatcaggcccttgtaggccaaatacttctgcacctaattggtgaaattggcgataacgacctttttgagggcgttcataacggaacattggccctaaataccataagcgttgctcttggttataaagtaaaccatgttcaattcctgcgcggacacaacctgcggtattttcaggacgtaaggttaagctttgtgcgtcttcacctcgatcggtaaaagtatacatttctttttcaacaacatcggtcacttcaccaattgctcgctgaaatagaggggtatgctctacgataggtgttctaatttcactaaaaccataaccggctaaaatttgttttagcgtattttcgattttctgccatacccgcgtatcagcaggcaggtagtcattcataccacgaatggcttggattttttgtgccactttttttctctaatagttattaattgatcaataaactgattatagaagcgaaaacaatcagtattcaatgtgaaatcaatagtaatacagactcattagttaatgagcctgttaattgcgtgttatttatccaattgatttatattaattcggaggttgccgtcaagcattgccgcttttgtacggattttcgcctctaataaatcaatcatattactattatcaagacgctctttttgtcttacaccgtcttcataaaaaccactgcgtgttttagctccggttacacctagtgtagaaacctccgcttcaccaggaccattaaccacacagccaataatagaaacatccattggtgtaatgatatcttcaagacgttgttctaattcattaactgtaccaataacatcaaactcttgacgagagcatgttggacaagcaataaaattgataccacgagagcgaatacgtaatgattttaagatatcaaagccaacttttacttcttcaaccggatctgcggctaaagagatacgtaaagtatcaccaataccttctgatagaaggatcccaaggccaatagctgatttcactgatccggctcttgcaccaccagcttcggtgatccctaaatgtaaaggctgatcaattttcttcgctaataaacgataagaatcaacagcaaggaaaacgtcagaagcttttacactgactttaaactgatcaaagttcaatttatctaagatatcaacgtggcgcatagccgattcaactagcgcttcaggggttggctcaccatacttttcttgaatatctttctctagtgaccccccattcacaccaatacgaatgggaatattacgatcccgggcacaatcgacaacttgacgaatacgctcttcattaccaatattaccaggattaatacgtaaacaatcgacaccatattcagcaactttaagtgcaatacgataatcaaaatgaatatcagcgaccaaaggtactttcacttgttgcttaattagtttgaatgcttcagccgcatccatagttggtacagaaacacgtacaatatccaccccaacacgttccagagacttaatctggtttacagtcgcttcaacgtctgttgttcgtgtgttcgtcatcgactgtaccgcgataggagccccatcgccaataggtacattaccaacataaattcgcgtcgatttacgacgaataataggtgattctttatgcattgattaattctcccatgcttccatgcttgctcaaatgtatagtcagattaagcgctcggtactgttatttttgctatttttccagtaaaacggcttaagtcaacagcttcaccattaaactgtaaacgagtaacagaaggtgcgcctatttttagtttataaggttgctcaccattaaattccaaacggtcaccggctttcttaataccattaaataaaactttattttgagcattacgaatttctaaccagcattcaccatcaaacatcaagaccagttgattttccacaattggtgcgggtgttgaattgccttcagcagaatcagcacgagaagtcgttgatgtggttaatggtgacaccggtaatggaactgttttaacttctgcctcaggtgtggcgtctgttactgatggctcggcaaccttattagcctgattatctactaatggagaagcaggcacttgtacattttcaccctcagatgatgggctattattatctaaggttgataaaggagattctatcgtattggtgttttcttgcggactattttgtcctatgtcttgcgaagccatagagactaattcttgttgatcggcttgatgcccctgccaccaccataaaccgactaaagctatcattgctattacaataacccaagtcaatttcatcaaccagccttcacgctttttatgacgtttacccaatgagtaattttgtgttgttgttactttgacttgttttattggggcttgttgatcaattagacctagaattgcgctttcaggaacaccgacaagttttgcataagagcgcatataaccacgtaaaaatgtcggtgcaataccagaagagatagtatcagcttcaatttcacatactgttgttaacttcaaacaaagtcgatcagcaacagtctgctgagttagccccgctttttcacgtgcctgacgtaaaagttgacccgctgttaatttcacttcttcggttttgttttcagtattcattagcaatctaggcactgtggctattggatgtttaacattgatgaacacgagaaaatacagtttttaacgtcctcatcgcgaatttggtgatttttggtattcagcatgctgacaaaccaaataatctgacggtatatcctcaattaacacattattgttgtttaataaattttgttcacaaaggaaattaccataaaaccttaatacattaacatttactggcttcgacttcatcgctaatttgtaataatctagcgcctgaataggatttcccaataactgggatgttaatgccattcctaaatttgcttcaggatgctcaggcatcactgacagcactttttgaaaatgatattgggctatctgatattgttgctcagccagataagcttcccctaattgaagacgaagaggcactgcaacatgttttttatttgctgttgattggcagcctattgtcaataacaccaagcagatagcaacaacctttgatgacatccttatcatcgttatcttccttaaattaatccattcttgcaactctctactttgttttaaaaacacagcacaaagcgagagttacccacctctatcagactgcttttactgaaattggttcaccttgcagacgttttttcagagtacgcttagttcggtcaatcacatcaccagcaagttgaccacaggcagcgtcaatatcatcaccacgagttttacgtacaatagtggtgaaaccatattccattaacactttagagaaacgatcaatgcgactattagaactacgtccataaggtgcgcctgggaacgggttccatggaattaagttgattttacaaggtgtatcttttaagcactctgctaattgatgtgcttgttcagtgctgtcattaatatgatcaagcatgacatactcaacagtaactcgaccttggtttgcattagatttagcaatataacgacgcacgccatcaagaaacatttcaatattatatttcttgttaataggaacaatttcatcacgaatatcatctgttggtgcatgcaatgaaatcgctaaagcaacatcaaccgcatcagctaatttatctaatgcaggtacgacaccggatgtagacacggtgactcgacgtttagataaaccaaagccaaagtcatccatcataatttcaagagccggaataacattgttaaggttaagtaatggttcacccattcccatcataacaacattagtgattggacgacggcctgtctcttttaaagcaccaataattttagcagcacgccacacttggccaataatttcagaaactttaaggttacggttaaaaccttgttgtgccgttgaacagaatttacactctaacgcgcaacccacttgtgacgaaacacataacgtcgcacgatcatcttcaggaatatagactgtttcaacttgttgagagcctactttaatcgcccacttaatagtgccatccgcagagcgttgttcttcagacacttcaggtgccttgatttcggcaatctcttttaacttcgcacgcagcactttgttgatatctgtcatctgatcaaaatcatcatagcaataatgatatatccatttcatgatttgatcagcgcggaaaggcttttcgcccatagagacaaaaagctcacgcatctgtttacgatttaaatctaacagattgatttttgttttttgattcacagtattttctttagaaacagcgacagaagcgcttggcgctggagtggtagattgggtcatgacattgcctcgttgttacactatgcggcctacgttaataaaatctattaacgggatacttattaattaataaaaagacgccccattaaagattaacagggcgtcgcattgtacattttttcgtatacagatgctaataaattagcgtgggcaaatttcgttttcagtaaagaaataagcaatttcacgcgcagctgaagcttctgaatctgaaccatgcactgcattttctgtaaagctatccgcgtaatcagcacgtaaagtacccgctaaagcgttatcaggattagttgcacccattaagtcacgatgacgttggatagcattttcgccttctaatacttgtaccatgatagggccagaagtcataaactcaactaaaccatcaaagaaaggacggcctttatgctcttcataaaaaccttctgcttgttcacgagttaaatgcaacatttttgctgctacgatgctgaaacccgcactttcaaagcggttatagattgcaccaataacattttttttcactgcgtttggtttgataatagaaaaagtgcgctgaatagccatgtattacctcaaaatattgtattaataacaacttatgttgcctgtttttatcgcagatcatggaaaaacagctcaaaaccgtatcccctgcaaaaataagggattgattatagggggataacaataaattgcacagatgaaatcccgcttttttttaaaaaactgtggcaaaaaagttataatttatcgatttaatcacattttttaccttcatttgattaaactctgcacttatttaacgaaaactaaaattcaccatatccgtttgaccgctaagatcaagcaccgaaagttggtatttgccacgtttttctaataaataagagaacgttgccccattttcagttttaccgatttgttcaccatttaaaaaccaccactgcataccacttcccccttgtgtagaaaccgttatttcaagctgagtttcaccaggcaatggacgcaataaatccccttttcttatcccagagatatacaaggggatcatatcttctttaatcggtggacatgttaatgaaattggtggtaatcgttttgctctacgctctttttcaggcaaccaagcatctaatgctatcggccatagagcaatatcctttaattgagcaccaggacaattaggccctgtacgttttccttctttatctatccatactttttcattgatgcctaaaatgccctcttggctttcattcaatagtgttgggggaatagtattatcaaggatccagcttcgtcgactgactcgacagttgctatcttctttaggcaaagcttttcccgttggccaacaaatagctgcggctgagacactatttggcctaggatcaacaggaggccgctgtttattttgataaaaataactcgtcaataaattattaacttgattcattatcggtacagcggttgcaaatccaaactgccccgcaacaggtgtgccatcaggtctccccacccaaacaccaatggtataacgcgcattaacgcctatcgaccatgcatcacgataaccataacttgtgcctgttttccaagccaaaggaacaaccgctgaaatagcactatcaggacgaggccgtgcctctcctgctaaaattcgccgaatgatccacgcagcaccgggtgacattaacatacgttcattgatggtttgctctggcgtaaaacgtaacggcgctgtttttccatgccttgcaagcgcactaaaagtcgccactaattgatccattcgtgttgctgttcctcctaaaataagcgctaaattaggttcagagccataaggaaaacgcatttcaaggtgattatgtcgcaacttagctgcaaatttttttgcgccataagcttctattaattgaacggcaggtaaatttaatgaacgactaagggcttcactcgcactcacggcaccgttaaatccagtatcaaaattaccaggacggtaatcttcaaaacggcgcggaacatcttgtaatagtgattctgcatggatcaatccttcatccaaagcaagaccataaataaaaggctttaaggttgatcccggcgaacgccatgcacttatcatatcaacatgcccaaagcgttgattatcattaaagtctgccgatccaacatagcctttaacactcatatccgtgtgatcgaccacaagtattgccagagaagttttatcggctagctgatatttccactgtttggctagctcttctagttgtcgctgaagattaatatcaatcgtggttgtgatcaccggcgctttttgctcgttatacatacgccgagccaataacggcgcgagttggggcgtttgtcttggtgcaagtagcacttgctcttgctttatttcagccactttctctttgggccaaatttgatattccgctaatctatctaatactttatcccgtgcagcttgagcacgctctggataccggtctggccttaaacgactgggtgcttgaggtaataccgccattaatgttgcttcacctgctgataaatcagcgggagatttacctaaataggcccaacttgcagcgccaatcccttctaaagtgccaccaaaaggtgcacggttaagataaatttctaaaatctcatctttcgagtaataccattcaagctgtaatgtccgccataattgttttaattttccccctaaagtccgtgagtgggggtcaatcaaacgcgcaacttgcattgaaagcgtactacctccagaaacaatttttcccgagcttaagtcttgccatgcggcacgtaaaatagctatagggttaacaccgaggtgctgataaaaccagcgatcttcataagctatcaaggcctgcaaatattcaggggaaacatcagaaagggtaacgtgataacgccatattccttctttatcagcaaaacgccaaagtggtgttccatcttcagccgttactatggtggcgatttgaggctcgggatctggcagtggccagatcttatctgctatccatagcaataatggtgttactaatagaaaaataacgctcgcggcgattaaccgcttatatcctagtttcattcaatcactcaaaggaaaaagccctttccgaagaaagggctgtctagcttaaggcacaacatcaattttattttttgttgcccctacggcacgccaataaggcacatacattgactcaacttgcggtggcggtacttgataactccccggagttaccgctcttgctaagtaaagtaatgtcgtaggacgatatttatcaaccgctattgcggcaacaaaacgatcatcacgatattcaagatgtttaatattggcttgtcccatatcatcaataaactcctgcaaatcagcagcgctatcgcttaagcttgcgctgcttgatgctaagttttgattttcaatttcaagccccgcaggtaatagatcaaccactaaggcatcaggtacatctctattagctgaaacctctaattttaccaccagcatttcaccactttgtaagcgattaggatcgactcgattgccttttagatcgtaataactacgattgatcttcaatacattgctataaggcgctggggcaacttttggatatccgacaacattcattcgagagtaaatggttgtaccaccttggttgtttagctctaaaccttcttgcaattgtgttgctgtcaatgcttcattaactgcgcgatcactactcattgctggcacttgacgattaatggttacttcccaaggcttctctgccatatcaataaagaaacgaccagcaaggtatagtgagttactctcttgtgtagagaaccattcacgccctgttaagttatcagataatgtaataacactggcatcacgagtttgagtttccaaattgttttcactgagtagcgcaataatcaacgcttggtcacgaatagtactgccgtaatcacctaaaccgtaattatatttacgtggcatggtgacaccttcagcaattaggctttcagcacgagagttatctcccatcaatttcaaagcaacacctaactgcacaagcgctaaaccactacccgcttgattacgttctagatataaacggcgcaattctcccaaaggggctttttgctgattagccagaactaaagccgcatatgctcttgctgagaatcgagccgcatcttggttaaccacatactcttcattaacaatatttttatcttgtaaataacgtagtagacgatcatttgcccgttttaatgcctcagtaggaacttcataaccttgttgagacgctctaaataagaaatctgttgcatacgccgttaaccaaaactcttcacgcccaccttgagcccacaaggcaaatcctccttcggatttttgcattgttaagatatgagcaatccctttttctatggcttcttttctttgcatatctgtttgtgttttgatccccaattgtttcaactctttctctgttgaatacaaggatggatataatccactaacagtttgctcaagacatccataaggatatgcaaataactctctaacataacgcgctacctgtaacggagggcgactagtaagtaataattccccctcaagcgttgagcgattaaattgatttaatgcttcgtttggtaggcgccaagactcaccatctgctaatgtattggcgtaatgtattgtctcagcaggatacgcagggcgtacacctattttccaagtattttgataaggttttatctcttcattaggtactttaataccataaatagacagggaaaattctccttggccaaatccatgttttgccgtaatagggatttgaacttgagttcgttcacctttcgataatgaaacggttttactgtcgacacccgctaaatcaactaatcctgatgccgtataatttaacgtaatagattgtggtgcatccgttaagttagttaaatctaatgacagtaacgcatcatctcccccagccataaagcgtggtaatgagagttgagtaactaatggcgcggcaacaacaactttaccttcttggctaccaaatttatccgcagtccatgcttgagccataaggcggacttcaccattaaactcaggtataggtaaagaaacctcaccttcaccttgtgcatttaattttacaggtgttgcttgttgagcaataatttgcacatctgttaatggctttttaccaccacgagataatgcgctttcttcgcttccatcaccaccaaaacgtaggttggctaaacgcccttcaccttcaattaactgaccataaacatcgtattgatcaacgctataacgcttacgaccaaagaaagcttcgtacggatcaggcgttttatagtcggtaatatttaagacacctgtatcaactgcagacactaatacattgatgttttccggcaatggctggcctgcaacgggcttagctttaatccgaatttttagatcttgatttggacgaattttttcaggtgcatccagtgcaatatctatacggcgattgttatcttgtagtggtaaatgcaaaatacctactgcacgttttaccgtcgcttgtttggatgtatcccccggtcttaccaccaccgaagtcaaatataaatcgtgtcttgcccactctttattaataggtacttcaacatcaagccctttttcaggtacatcaatctcttgccaccatagtggcccatcactcgattctaataacacatagcctttgccaggatgaggggctgcaatattgagtttgactttttcacccggtaagtaactctctttatctaattttaatttaacttgatcaggtcttactgccccggttccgccagtattatccatccaagaatagcccgcccaaaaacgtaagctactgacaagttctgttttaggatcgaccacttctatacgataagagccccattcaacagggaaagccacttttgcggtaccatctttagctattttgatagtctgctcatccatttgcagatctttttgattgtagccagactcccaaccatttgaattagaccaacgccaataataatcataacgttcgtaaataaatcttacttttaggtcatcagcaggtaattttttaccctcttgatcggtataaacgatttcaaactccgccattgagttttcatcaacactatagcctgatttatatttatcattacggtagtcatacacctcttttttagcaaaaacagggcgaattcccgcaagatgtgtcgctggccataccgcttgttgataacggcgagtaacaggacgccctcctgcttcaagtaagcttgcttgtaagataatattaatcggtgatttcacttcagcataacggtctttatcaaccgttaatgccccttcaccatccgtatcaagagtaagttcaaattcatctaataaacgacttaaattttcatcttttacggcaccaaattcataacccggcagttgactgacggcttctcgcgaagcttttaagaaaacctgcccttgcaagcgattatctgctgccggtgcaccataaagataacgacctttaatatcaaaataagcattattaccactgagtaaaatgccttttttaccggtgatctctaatgccatacgctcaggcataaaatcttcaacttggaattggtagaagcgtggagtgccatcgcctaaatcaaaacgtaatttccgaatacctgtactctcattttcagggatcatcagtttcaactgataaaaaccattttcaggttgccaaacaaaactacgggaaacctgaccatccgtttttaataagtcaactttaacaggttgctctttaatcgggtttccatcaccatctcgcaataaaccattaacgattaaggtttcgccggggcggtacagatcgcgtggaccaaagacaaaaaattgtttgctataaccttgtggcccgccgatatcaaactcggataaatcaagggctggtttacgcaaatcaatcatactggtttgcccattacgaatagcgagtaataaacgtgctttatcactcttttctaatgtggcatgcccttgattatcagtttttgttttagatattaaattacctttttcatccaaaagacgaatttcaatattgtctaatgctgcgccatttttcagggattgagtaaaaatatctagcgtattaaggtagctatgtactgataaaccgatatcactaaaagtaaataccgttgccggcatggtataggagtatttacctgcctgctgcattacggcgatatagacgccctcttttttcagggcttcaatagatttgagtggtaataagacattttcacgggtgtttttttctgtatcaagttcaaagcgcccgctatacaccaaatccgcttgtgacagaaaatcgtctgattcccaatagttaatattagagcggctttcccattgagttaaaaattgtgtcaaccgatcatctttaactcggaaaaagttaacatcgacttgttcgacatttaatgcgctaattggcaaaccttccgttgcttctaacggtaataatgagcctttactggtaaagccgaccgatggaaaaatctcttctgtagtaaatttttggctaaatggctctactaatttacgttcgttaattcctttaatttgagcatcaatagtcaggtttaactctgttgaaggtggcaaatggcggaatcgtaactccatcagattatcagatagctcccaagccccttctaatttaccttttttagtatcaacaagacggataacatcatcaaatttctgatcaggatcgagtggtactgaaaaagtcactaccatcgtacttgcgccatcgcgttgtaattcagaggcatctagtacagtcacctctttacctgcataacgacgagcaagttcattgcgcacttcttggctagttaatgcagtttgattattcgttttggttgtaactgcggttttatcaccaagttgtgttgtcgtttgttgcgatgtgcttttttgttccgcaacttgtgttggttgtgagttatcactcgtcgaagattgctcatcttctgttttgttatcatcacagcctgttaaagctaatgctgaagccagtaccactgcaagtgtacaccaacggtaccctcttttttccgtgtactgtctaaattgatctcgattcatatccatttcctttaattcaacccctgaattatatgatgttttatgcaggctacaataatacctaactcattaagtaacctaattatttaatactacagccttatttgggctttactaattatttatttgtgcgtttttaagcaaagtaatagtaaaacaaagagttacatataaatgcaaaccatttgctattttaatcattttcttattatagggtaaaaaaaagcgatatctgatgagatatcgcctaaactgcaaaaaattaggttaggtattcaaattaacgattggaatacccttacgaagaaagccccctaatttgcgttgataaaaaggggttacatggtgagtcataaaatgacttacaccttgctcatctttattcacaaaacagaaatccagagattgtccttcttctaggtgctcaaaagcggcttcagcagcttgtgggagtatctgagcaataatattttcttctccagtgatttctagcccaatcaaataaaatgactcatcatcaccttgctccaaagcattaacaataaatgcacgacgaataggcttatgttgaccaaaaaattcgctcaatgcttgtgttaatttttcaggctgtggctcaagcacactcagttgtagagaagaaccttcaacagcaacaatttcttgtacttcaaattgttcagatacatccattacaaactccaaatcacataatgtttattattttgcttttgttaataataaattagcgatagaacgaacaccatatcctgttgccccagcagcccattgctctacagatgattttctgtaagttgctgaacagtcgatatgtacccagccttttttataatctttcacaaagtgagaaaggaaagcggctgctgtacttgcgcctgcggtatgtgaaggtgcggcaatattattgagatcagcaaaacttgatggtaactggctacgatggaaatcagctaatggtaagcgccagaacagttcattttcttgatctgcacttgctaataattcattcgctaatttatcatcaaaacttaatacagagtgataatcattacctacggccactttagctgcacctgtcaatgttgccgcatcgataatcaattcaggggcaaagttgctagcatcaattaaaccatctgctaaaactaaacgaccttctgcatccgtattcatgatttcaacggatttaccattacgataacggataatgtctcctaacttaaaggcattaccgctaaccatattatcagcaatacatagcaatagttttacgcgtttatttaaacctcgtgtaatagctaaagccaaagcaccagctaaggttgcagcaccgcccatatccgctttcatagaattcatggaagaagaaggtttgatgctatatccgcctgaatcaaaggtgatccctttaccaacaaggcaggcaaagataggggcttcggcatctttagttggattaaaatctaatgctaaatagacgggatcacgtgaagagcctcgacctacagtataaattcccgcatagttctgatctctcagatcagcccctttggtgattttatagctgatatcttctttatctaaaccacaaaacagatcaacagtacgctgtgccagttgttctggccctaactcttctgctggggtatttattgtgtcacgcacccaatcaacaatgcggatacgcgactctaattcttttttgtccgcttcacttaattgtggccattcgattgaacgtgcgcctttaggtgctctaaaacctaaccaaaacgcccaactacgttctaaatcccagccgtcaccaactagagcaacattacgaataccttgaccatcaattttgcgtccaccacgctgaatggcccctaagcggttttcttccgttaagtgaacggtcatgccagtttcgttagtgctaattagtgctttttctccccaacatgctgctgcaggttcattagacagcatgataggcataatttgtttattcatttattatctcacttattattactgatggcagttaacctattcagactaccagatatttaccttttagcgtgatcaatttactgcaaaaaatcagtcacgaccattctcattaaagccttttagctaattgcatgttactttacgagcaatatcccataaacacacgctggttactcagtcttttgaggtatttattcctcttttaaggttaaatcatactgagcaataaaaacaaaaagactggcaattaaccagtctttcgcattaatcatttactcgattattcaaattcatcaagccaaactaataaaattgcttcaagaattttttcattcgatttttgtggatcatcatcaaaatcgtctaattggcaaatccactgatgcatatcggtaaaacgaacggtttttggatctgtatcggggtagagatcataaagcgcttcccctatttcacgtgtatcactccatttcattttaaactcctaaaatcagtgttctctcgcatggttgatagaatatttaggtatttcaacgactaaatcttcatcagttaccttcgcttggcaacttaaacgactttctggctctaatccccacgctttatctaacatatcgtcttccagctctgtactttcatcaagagagtcaaagccttcacgaacgatacagtgacaagtggtacacgcacacgacatttcacacgcatgttcaatctcaatgccattacgtaatgcaacatcaagaatagactcaccttcagtggcatcaacaacagcaccttccgggcaaagtgtgctatggggtaaaaatacaattttaggcatagttatatctcatccacagaatgacctgccaacgcttgacgaatggaagtatccatacgacgcgcagcaaattcctgagtttgcttatccagttgtttaatggcgttttcaatggcaacaggatctgttccctcaacgctttctattaaagtatctacaacattatcgatagccgttttctcatcttcagttaagagatgagcatcttcttgtaatgctgcggttaaactttctaacacgcgagcggcttcgactttttgctcggcaagacgacgagcttgtaaatcttctttggcattttccattgaagattggatcatattagcgatttctgtatcactaagaccataagaaggttttacctgtactgaggcttcaacaccagtggatttttccatcgcactaacgcttaataaaccatcagcatccacttggaaggtaacacgtatatgtgctccccccgccgccattggcggaataccccgcaaagtaaaacgggctaatgagcgacaatcactcaccatttcacgttcaccctgtaccacatgaacactcatggcagtttgaccatctttaaaagtggtaaattcttgtgctctcgcaacagggatagtggtatttcgagggatcactttttcaaccagcccgcccatggtttctaaacctaatgaaagcggaataacatccaacaagagcatttcgctatcaggtttattacccaccagaatatctgcttgaatagaggcaccaatagcaacaactttatcagggtcaatcgaagttaatggttcacgtttaaaataatcgcctaccatttggcgcaccagcggcacgcgagttgatccgcccaccataaccacttcgagcacttcatccacgtcaacatcagcatcttttaatgctcgacgaacagataacaacgtacgtttaactaaaggttgaattaataattcaaattcagcgcgggtaatttcccctttccaaccattgatattgatatcagccacatcattatcacttaaagcgattttagtttctgaggcaatatcaagtaattgacgttgtaaaataacatcattttgatagccaaatcccgcacgctctctgatccagtcggctaacatcatatcaaagtcatcaccgcctaacgcagtatcaccaccagttgctaagacttcaaacacccctttagttaaacgtaagacagagatatcaaaagttccgccccctaagtcgtaaacgacaatagtgccttcttttccggaatctaatccataagcaatcgcggcagcagtaggttcatttaataaacgtaatacatgtaaacctgcacgacgtgctgcttctttagtgccttgacgctgtgcatcatcaaaataagcaggtacagtgacaaccacaccatcaagttcaccacctaatgattgtattgcacgctctgctaaggcttttaaaatatccgcagaaacttgaataggatcgacaatgccagcaggtgttttaattaatggcagtccactatcattgtcatgaaaatggtaagggaggttaggataacgactggttatatcatttagcgagcgccccagcattcgttttattgagctgatagtattggcgggatctttttcggcttcttgtttcgcctgccagccaacattaatattatcaacttgatactgcacaacagatggcaataaatagcgaccttcactatctgaaagcgcttcggcttgcccactacgtacagtggcaacaagtgagtgtgttgttcctaagtcaatacccgcagctaatcgacgctgatgtggcgcaggtgtttgtcctggctcgctaatttgtaataatgacataacaattttccttaaaaaccatcaaacaagcgttcttcaagatgctcgacttgctcttttaatttcgcgagaaaacgtaattttctcacattgtctgcggcaatgtcccaagtctgactgtccagtgttttcaccatttcatcatagcgtacagtgtacattttctctaagcgcgcagaaaaatcagccagtaaattttcagcatcagtactatgctctatatcatccagctcttcacgaagcgtaagctgctccataagaaaagccgtatcgtgcatcgtttgttgttcattagcaatatcgatgccctgtaaagagagcatatattcagctcttgaaagtggattttttaaggtttgataagcctgattgatagtcgaagcaaacgaaattgcttgtacttgctctttgtcagatttacccgcaaaacgatcggggtgatattgacgttgcatctcttgataacgagaagcaagctgttgtttatcaatatcaaaacgattaggcatgcctaatagggtgaaatagtccatacttctgctcttggattaattgatattaataccgtgtataaatattgattacacggtaaagctttctccacaaccacattcgttagccacgtttgggttgttaaacttaaagccctcgtttaatccttctttaacgaaatcaagctctgttccatctaaatagaccatgcttttaccgtcaataataactttcacacctttatcttcaaaaacggtatcttcgtcattgatgacatcagcaaactcaagaacataagccatcccagaacagcctgatgttcttacgcctaaacgcaaaccttcgcctttgccacgattagcaagaaaagagcgaacacggttagcagcggcttctgtaagggaaattgacatggcacacctcactcataaagaacgaaagcggacactgaaacataaccttcagcatccgccaatattttatttttttattataacaggcaattatttgccttggcgtttgcttttatagtctgcaatcgcggcttttattgcatcttcagccagaattgaacagtgaattttcactggtggtaattctaactcttcagcaattgcggtatttttaatcgcttctgcttcatctaaggttttacctttcatccattcggtaaccaaagagcttgatgcaatcgctgagccacaaccataagttttaaaacgtgcatcttcaattacaccgttatcatcaactttgatttgtagcttcatgacgtcaccacaagctggtgcgcctaccataccgctccctactgtagggtcgttgttatcaaatgaacccacattacgaggattttcataatgatcaattactttatcgctataagccatgatttaactcctgaaaacgtctgattaatggtgagaccattcgatactgttgatatcaacgccttgtttatgcatttcccaaagtggagaaagatcacgtaagcgaccaattgcactgtgaatttgttcaattgcataatcgatttcttcttcagtggtgaaacgacctaaagagaaacgaatagaactatgtgctaattcatcagttaatcctaaagcacgtagtacataagaaggctctaaacttgctgatgtacaggctgaacctgaagatacagcaagatctttcagtgccatcattaatgattcaccttcaacatagttgaagctgacattaagaatatttggcgctgtatgttctaaagaaccattgatatacacttcttcaatatctttgatgccattccataaacgtaaacgtaattcatttaaacgtttagtttcatcagccatttcttctttcaatatacggtaagcttcacccatacccacaatttggtgaacggctaatgtacctgaacgcataccacgctcatgcccaccaccatgcatttgtgcctctaagcgaatgcgtggtttacggcgaacataaagcgcaccaatacccataggtccgtaaactttatgtgcagaaagagaaagtaaatcgacttttaatttggagagatcgattggtaatttaccgacgctttgcgttgcgtcaacgtggtaaataatgcctttgctacggcataattcaccaatagcagcaatatcttgcaccacaccaatttcattattcacgtgcatgatagaaactaaaatagtgtcatcacgcatagcggcttcgagttctttcaaatcaattaagccatcgctttttggtgctaagtaggtcacttcaaaaccttcacgctcaagctgacgacaagtatctaaaatcgctttatgctcagtttttgatgtgatgatgtgcttaccttttttctgataaaagtttgcaacaccttttagtgccaagttatctgcttcagttgcccctgaggtgaaaacaatttcacgaggatcagcaccaataagatcagcaatctgattacgagcgatatcgatcgcttcttcagcttgccatccaaaacggtgcgaacgagaggctgggttaccaaaaatgccgtcaatagtcaggcattgcatcattttttcagcaactcgaggatcaacgggtgtggttgctgaataatctagataaatgggtaatttcattgctcactaactccaaagacgacagatcttctttaataattttgttttgtttgcctagagatcgccgttaaactcgcatattaacaatggtttcttgtaaacgaccattgatagcatgacgtttttcattgtcttgacgatcagcgacatccataacctcttcgttattaactaactcttcaaggctaatgctgctaaggaaactggtaatacgatcacttaaatcacgccacaaagtatgagtcaggcaacgatcgccaccttgacatccttctttattaccctgacaacgggtagcatcaacagattcatcaactgctgaaatgacttgagcaacaaaaatttgccccgcttcacgaccgagtaaataaccaccacccgggccacgcacacttgcgactaattcatttttacgtaaacgtgaaaaaagctgctcaaggtaagaaagggaaatcccttgacgctcagaaatatcagcgagggggacagggccttgctgcgaatgcaatgcaacatcaagcatagcagtaactgcataacgcccttttgatgtcagtctcataacaaatactccgtggtgaacaatagtcaaattgtgtcattcctgagtaatttagtcaactatttatctgagtgttttagtcaggtattaagctcagcaacaatgacgcatgttaatcaacttaatcctttatttcttagcccatttttcaacggatgttaaaataccacgtaagatatgaagctcttgtgtttctggacgtgcgcgtgtaaacaaacggcgtaaacgactcatcacttgtcctggatgtttaggacgaataaaaccagactcattaagtacctgctctaagtgaacataaaagcgttcaatatcttcagcgggtggataatcaatctctgatgaagcattttcctcttgtttttcctgttgagcaagtgcagccatgcgaatttcataacaaacaagttgcaccgccatcgctaagtttaaagagccatattcagggttggtaggaatatagaggtggtaatcacatttttgtaattcttcattagttaagcctgtgcgttcacggccaaagatcaccgcaacgggcttatttgctgcctcttttacgcaacgttcaccacattcacgaggtgctagcattggccaagagagcgtacgattacgcgcacttgttccaatcactaacccacagccttcaatggcatcatcaatagtctcaacaatatgggcattgccaataacatcgcttgcccctgctgataaggctatagagtgagagtcgggtttttctttaggattaacaaaataaagattcgttaatcccatggttttcatagcacgagctgtcgagcccatattgcctgtatgtgaagtttcgacaaggataatgcgaatattttctaacattgatttctaactaattgttttatgatccatctattttatcacaaatgtagccaaaaacgcgaacgcctgttatacttcgcctcgttttttatccccgttctttaacatcttgtggaagataaccatgcatccgatgctgaatattgccatacgtgctgcacgtaaggctggtaatttaatcgccaaaaattacgaaaatcctgaatctgtagaaacgagccagaaaggtagcaatgattttgtcactaatgttgatcgcgaagcggaacaggcaatcattgaaatcattcgtaaatcttatccaaaacacaccattattacggaagaaagtggcgagttactcggtgaagatcacgatatccaatgggttatagatccacttgatggcaccactaactttattaaacgcctaccacatttttctgtttctatcgctgtacgtatcaaaggtcgcacagaagttgctgtggtttacgatcctatgcgtaacgaacttttctcagctgttcgtggtcaaggtgcacaattaaatgattaccgcctccgtggctctaatgcacgtgatttagatggtgctgttttagcaactggtttcccattcaaagcaaaacaacattcagcagcttatatgaatatgctgactaaactgtttgtaccatgcgctgattttcgtcgcacaggttcagcagcattagatttagcttatgttgccgcgggtcgtgtggatggcttctttgaaattggtttaaaaccttgggatttcttagcaggtgaacttattgctcgtgaagcgggtgcaattgtatctgactttactggtaatcacggctatctacaaactggtaatattgttgcgggtaatcctcgagttgtccgagcattattggcagaaattcgtagcgaattaactgatgctttaaaacgttaattgatacgaataacaataaaatataaaaaaactatcttaaaaaaactatcttataaaatgatccccagtagttggacagccaattactgggggtcttttttattgcctatgcgttttcaattaaaagggcatttactgaaagttggctaatttcttgtgcaatcttatctaatagttgtgatgttatctcttgcttattaacacgtaatagaaaagcttttcttgcaatgacaaaccctaatatctgaccaataagagcatgagcacgaatagtgattgttacttcatcactctttgtatccattaatccaactaagcgagaaaggcgaagatgaaaaggctctatcagattactataaataagatcgtaattttccgtcggttctaactgttcacgtaggatcaactgactgtaataatggcgttttggtgataataatgcacgagttaaacctgtgactagtaatagaactaattcagccactttttcatttttataaggtcggttttctttcaataaaaactgaagcttattatcaaattggtcaaactgaatttcagaggctaattctgtagcaatatatcggatcactgctgtataaacccctaattttccgccaaagtggtaaggtattgctgattgattaacaccagcatcttgcgcaagttgtcgcgttctcaatccactgatcccatatagtgcaaaaagcctaataccttcttgcactaatttctcttgagtttgttctgtacttactgcagttttactggtgtttttcattataatcaactggttactattaggactatatatctgcccgcattaattgtgttgagttagaatttaactcaatccctttgcttttgccaaccacaacagtgccacctaaattacataagtggtggccgaagccacaattaggctcaaaagcaaatgtcataccttcttgtaataccaattctctccctggattaggtaatcgctcaatttgtttataacgatgagcaagaggtaatgattcaatacctggcgctgtgccaaagccgattgggccataaggattaatactgtgaataagtggatgaacatgccatccccctgattctaatagtggtttttccattaaatcaacgacttcaccaaaggttatccctgcttttaaatgttcaacgccaatttcatagcattcacgtgcaactaatgctgctttttctaagttttcgtgaattttacctacagcaaccgccgcttgatgttgcgtttcatacattccatataaagcaaaaatctctgataatataatatcacccatttgaatttcacgaggtgattgtgagcgatattgccaagcaggaggcccccaaccgatatactcagatcctgatcccattaaaatttcagcggtaaatcctccccttgataaacaagtggcagtaattgcagccgcaagctccgcctctgttgcaccaggccttgctgtcactcgcattgcctcgctcattgcttcaccaatggcggcagcatatcttacatgagcgagctcttcttcacttttaactgatgcccgtctaaagaaatcacgatacacactgctaaattttgcataaggaaatgcttctttaataccatttagagtattaaatggcattgcaccatcaaaataaaatgggggataaggttctaagccaataataccaatatgtgcattttgttgtactcccatctcttttagaaaatgagcaatactacgccctgtttttcctacaacaagattatcttcatcaacccactgcaaatcaccacgtagttttgcctgcatatgatcagctatcatcattggtgcaaaagtaactatcaatggtttcttatcttcatgaaaaataacaaccgatcctaatctgtcatttgtaaaatagtggtcaatacagaacggtgcaggtgctgcagattctctatcaccataaataatcaatgtatctaattggttatctctcataatgtctctagctaactgccagcgtcggtctctttcttgtaaagaaaaactagctgggatcactgatttacttttcatagtaatacctttttttattcattcatttgaatgaattaaatttagctttaatatttaaaatgatcaatcgtttggttgatcaaaaaatgcgctttaaaaaataaaaagaaaaaaacctgtaatatcaaaaggtattacaggcttagacgtttatgaaaaataggaaataaaaagattaagtattttgcggttgtactttcggtctaataaacattgcaggaatagttaatgccgccatcaaccagaaaatgaggtattcttggttagggagtttttcatataaccatcccgatacaatcgtcataatagcgatacttccccccattgctagagcagaataaaccgcttgtaaacgaataatttcatgctcttgacgtgcagtaataaaacgcattgccgctaaatggcatacggtaaatgtgccactatgcaaaatttgtacaataataagtgccggtaatgctgtaaaactgcccatcatcccccagcgcaatagccctgcaaatgctgaaagtaataataagtttcgagcactccaacggcggaataaacgacggctaaacataaagacaaccacttcagcaactacgcctaaggaccaaagataaccaatcgttgctgtatcatagcctgctttttcccaatagagtgcgctaaaaccgtaataagcagcatgagcaccttgtagtaaagaaacacataatagaaaacgccagactgggccatctgaaatcagtttcataaatgaaacatgatggtgttccgcttttttgaccttaccttggggcatgattttcggacgtaacattgaggtaaggaataatgcaagagtactggcaatcaatccataaagaataatcgggtgtccaaaagcatcaatcaatatccccaataatgaggaactaataataaatgcaatagatccccaaacccgaatttttccataatctaaaggaaattgtttttgccatgttcccgcaagtgaatctcccaaaggcaccatgggtgcaaaaaaaacgttaaatccggtcattaccaaaaagagccaagcccaatgagtgcccaacataaatgcaacggtaaataggagagataaaaaagcaaaaagtcgcagtgcagtaatgagctttgatggatcttttacagccggcgttaaaatcaagcttcctacaaaacgagcggttaagcccaccccaagtagtaagcctatcatcgcaggatcaaccccctcgccctttaaccagatagaccaaaaaggcaagaaaataccatatgagaaaaaatacgtaaaataatctaaggcaagccacagtgttgatggaataaccatccaaccccccatttttaacatgcaaaaaaacccgccaagaacatgttctcgaagcgggcttgtataacgggttttattatatcgttacaaacttatgcgtaaactggaaatttagcgcagatatccaagactttttgtttcactttttcaatgttcgcttcatcattgatattatcaaggacatcacacatccaaccggctaaatcttttgcttccgcttctttaaaaccacgacgtgtaatcgcaggagaaccaatacgaataccagatgtaacaaatggactgcgaggatcatttggcacactatttttgttcacagtgatattagcacgacccagtgcagcatcagcatctttacctgtaatatctttatcaactaagtctaataaaaacaggtggttctctgtgccaccagatactactttataaccgcgcgctaagaaaacgtctaccattgctttcgcattttttgcaacttgttgctggtaaactttaaactcaggttccattgcttcttttaatgcaacggctttacccgcgatcacatgcattaaaggaccaccttgagagccagggaatacggcagagtttaatttcttataaaactcttcatcgccacccttagcaaggataagaccaccacgaggacccgctaatgttttgtgtgttgttgtagtcacaacgtgagcatgtggtactgggtttggatagacacccgctgcaatcatacctgcaacgtgagccatatcgacaaataagtaagcccctacgctatctgcgatttcacgcattttagcccaatcaaccaaacctgaataagctgaaaaaccaccaatgatcatttttggtttatgctttttagcttgctcagcgatatcttggtaatcaattttacctgcttcatcaataccataaggaacgatattgtagagtttaccagagaagttaaccggagagccgtgagttaagtgaccaccttgggccaaattcatccctaatactgtatcacccggtttaagtaatgccatatacacagccgcattcgcttgtgatccagagtgaggttgtacgtttgcataatcagcaccaaatagtgctttggcacgatcaatagctaattgttcaacaacatcaacgtattcacaaccgccgtagtagcgtttacctggataaccttctgcatatttgttggtcagctgagatccctgcgcctgcataacacgaggactagtatagttttcagaagcaattaattcgatgtgctcttcttgacgagtcacttcaccttccattgcattccataattccggatcgtaatcagcaatattcatttcacgttttaacattcacatctcctgactcagctaacttcactaaaggcgaactcccttacgggagtaagaatgacatacagtgtaaactctttttcctcattgagatagtcccaaaagaaaaaatacgcaatcgtttgctaagccactataacacagttctattactttttgataacctcattttatctgctgtttttgttctttttgaggcacatctcgctaatttatgtaaaccctcaacatcattctctaagatttccccattttcctaaaaaaaaataaaaactcagatttacaaataaagcaaaaagatataagttgtattaaaaatacatgttataaaaatcatattaaactgaatatttttcaggagcaattatgttagatgcacaaactatcgcgacaattaaatccactattcctcttattgctaaaacaggccccgcgttaacggcacatttttacgacagaatgttctctcgccatcctgagttaaaagatatttttaccatgagccaccaaagcagtggcgcacaacgtgaagcgttatttaatgcgatatgtgcttatgcaacgcaccttgaggatttacctgctattttgccggcggtagaaaaaattgcacaaaaacatgccagtttgaatattcttcctgaacattatcctattgttggagaaaacttattagccaccattgatgaaatgtttaacccgggcaaagaagtgcttgatgcttggggagccgcttaccaagttttggctgatgtttttattaatcgggaagagcaaatttatcaacaaaaagaacaagcatctggaggctggcgaggattacgtcactttaaagttaagcataaagtaaaacaaagtgaggttattaccagctttgaattagagcctgaagatggacaagcggttacaccttaccgtgcaggccaatatttaagtatttatattcgtgatgagaaacttgcaaatcaagaaattcgtcaatattccttaacgcaatcggcaaacaataaaacctatcgtattgcggtaaaacgtgaagacaagggaattttatctaattttcttcatgaccatatccaagaaggagacatcttacaagttgccgcaccagggggcgatttttatttagatatctcatcaacaacgcctgtcacattaatttcagcaggtgtaggcttaactcctatgttagcgatgttgcacactctctcttctcaccaagcacaagtcaattggttacatgcagcggagcatggtggcgtgcatgcttttaaggaagaaatcgcacaagcaggaaagcaaattgaacaatatcaacaagccgtatggtatcgtctccctcgtactgaagatataatcaataaagactatcaatttgaagggttgatggatttaaccaagatacatgaatggctatcaatacctaatatgcagttctatttctgtggtccattaccttttatgcaatctgtcgctaaacaacttattactctcggtattgaaagcgataaacttcattatgagtgctttggccctcatactgttattagccaataacagccagaataggtaagagaataaattaaataataaggaaaaagcgctgattattttactattcagcgctttttatattggaaaccactaactatttaataagtaacttttattgatgtcggtataacatgatatttagacgaatagcgataccaaataacactaattaaacagagtgtatagccgaacaactcgctaccttcttccaccatattttttactgtgcggttatagtcttcacctaacaatttctcccacaaaatccccataccaaataagcgagagaacagtaaaacactgagtaaacccgccataagcattccttgactagaatgcgttataaaatgggttaagccatataatgtttttttcccttctctgatagcgatcgctatacagacaaatgttaccgttaatgcaaaccaaacccatgaaccatgtgctaattggtcaaaaacaccatctaactcacgaattaagatacacaagaaaaagcccataatcagtgtgtatccccctctcatttctggctgtttataagcaggtataaagaaaagaagacatattatagccacaataagttcttgccccagttcggttgctgaggtttcagaaataccattattcagcaccaaaatatcgaggaaaataaaccctgttgttattgccacaatcatggcggaaaacaaaaataaagcaaaacgctttaataaatagctaagcacgatattacccatagaataataaatatttaagttgatgataataactgtctacaaaagttattgaataacattttgtgccttaaaaggtgagaattttagtaaaataaattgtttattatcatcaatagacttgtataagatataaatagcacaataggtgaaacataaaaaaacattttatgaacaaagaaagataattattaatattacttatttaatgagtataattatcagcaatacaaatcatttattatcacttataaatttataaaagataatcagtaaataaataaacttattgagataatataaaaaagaattaattaataaagataaaaaaacctgataattaaactaataatcatcaggtttcataaacaacgcttatttattttttaaatagcttcttcgtcttgctctccagtacgaatacggataactcgattcacatcaaaaacaaaaattttaccgtcgccaatcttccccgtttgagcggtagtcattatagtatcgacacaagtttcagctatttcatcagcaacaacgatctcaatttttactttaggtaaaaaatcgaccatatactctgcaccacgataaagttcggtatgccctttctgacgaccaaagccttttacctctgttaccgtcatacccgtgataccaacttcggctaatgcttctcttacatcatctaatttaaacggcttaattatcgcttcaatttttttcatcggattatcctgctattaccagttatggcgaccaaaaccgcttgtgatcggatagcgacgatctttaccaaaattacgactggtaatacgcggtcctaccggtgcttgacgacgcttatattcattaatatcgactaattttaccactttacgaacaatggcttcatcaaatccagccgcaaccaagtcagaaacagatttatcttgctcaacatagccttcaagaagggcatctaaaatatcataaggtggcagattatcttgatctgtttgtcctggtgctaattctgctgaagggggcctatcaatcacacgttgtggaatagcgggtgaaagagtattacgatatttagccagttcaaacaccagtgttttaggaacatcttttaaaacatcaaagccccccgccatatcaccatataaggtcgagtagcctacggcagattcacttttattactcgtggtgagcactaaccgacgacgtttattggacatcgccattaaaataacagcacgacaacgcgcttgtagattttcttctgtggtatcgacagcgctacctttaaacataggcgaaagttgatccataaaagcatcaaacatcggctcaatagagacagtatcaaactcaacacctaataaattagcttgctctttcgcatcgtgaatactcatttctgaggtatagcgaaatggcatcattaccgcttgaacgctctctttacctaatgcatcaacggcaattgcaactgttaagcctgagtcgatgccccctgataatcctaatatagcgcctttaaaaccattttttgtcacataatcacgcgttgccagcactagtgcttgataaacttgcgctaaaggagaaagctctggtgccgcatcttgcatcggtacgatagttaactcatcaaactccaccacggccacttgctcatcaaaagccgctaaacgatgggtgattgttcctcgctcatcaaagactttagaacatccatcaaaaaccaattcatcttgaccaccaatttgattgagatacaccacaggcagatgcgttctttggcaatgttctttaattaattgggtacgaatatgtggcttttcacgactataaggtgaagcattaatagaaagaaccagatcagcacccgcttgttttagtgcatcaataggctcgttgatccaaatatcttcacaaattaataatcctaaatgatagcctttaaaaggcacaacacaacgttcatttccttgctggaaataacgtttttcatcaaatacaccataattaggtagctgttgtttgaagtaacgcgcctgtaactcaccttgatagaaaaatgacagtgcattatagatagtaccgttttgccaccaaggatgcccaaccacaatggccgttttcttacttgcttgttctaaacgaaccagttgctcttcacaacgttgttggaaatcagggcgaaatagtagatcttcaggagagtaaccgcataacgcaagctcagaaaacaaaaccagatcggcatcttcttgcgcttttacggtggctaacatgcgttcacagttgccttcaatatcgccaacaacccagtttaactgagcaagtgcgagttttaatttacgactcataaaaattagtctctccagctatctttgctatctaaagaaagcaagtttaaaaaaatttttgttatctacaaagatcattctttgaaatcattggcatcaagtccatgacgtgacaacaatttataaaattctgttcgatttcgccctgccatccttgcagcttgagtgacattgccctttgtcatctgcaataacttccttaaataggtcatctcaaaatggcctcgtgcttcagcaaaagtaggtaatgcggtattttccccttgcaatgcttgtgtgacaagggcttcgctaatcacaggtgcagtcgttaaagcgacacattgctcgatgacgttaactaactgacgcacatttcccggccaacttgctgtcattaggcatttcatcgcatccgttgagaagctacgcacaaaaggtttatgtcgttttgctgattcgcgcaataaatggttagcaagaacaggaatatcctcggctctttcgctcaacgtggggatacgtaaattcaccacatttaaacgatagtataaatcttctcgaaattcattacgctccatcgcttttggtaagtcacggtgggttgcagaaagaatacgcacatcaatatcaatatcacgattactgcctaatggccgcactttacgctcttgtaatacacgcagtaatttcacttgcaatgccattggcatatcaccaatttcatccaaaaatagagtgcctccttctgccgcttggaaaagtccttcacgactacttaccgcgccagtaaaagcacctttagcatgcccaaatagttcagattctaataattgttcaggtaaagcaccgcagttaatagcaataaagggttttttagctcgtgggctggcgcggtggattgcttgagcaaggacttctttacctgtaccgctttgcccattaatcagtacgctaacatcggattgtgcaactaacttggcttgctctaataaacgtaacatttgggggctacgggtcacgatatcttttgaccactcttcatcagataccgtcgtcactaattctaatgcttcatcgatagctttataaagcgcatctctatcaacaggtttagtcaagaaactaaacaccccctgttgagttgccgcgacagcatcaggaatggagccatgtgcagttaaaataatcacaggcataccgggttgttggcgctgtatttctgcaaatagcgccataccatccatttcatccatacgtaaatcgctgatcaccagatcgattttttcttttaataatagtttaagtgcttcttgcccactttcagcggtaacgatatgaaacccttcacttgttaatcgcatacccagtagctttaataatcccggatcatcatcgacaagtaaaagattcgctgatttatggccagccatgcacattctccttatttagatcctgtttcagtaggtttaaccgttgcgctattctctttttctgtcgaggtatttttcgcatcaggttttacttgttctgcttttggtggttcaggtttaactgctgataccgaaggttgtgaaacctcattattttctttggttatcgattgctcacttgccgttgacttattggattgctccgctatcggtttatcggctggtttttctgcattactcgcatctgaagattgaacatcagatagtgcttcttcttgagaaatagcatccacagaagccccttgttttcggctcgataattgacgttcaatttgtgtgagactttcgagttttttacgtgtggtatttaactcatgctctaatgcattattttgttttttcagcaaatccattttattttccgtttctgtaacaaaacggcgattacgatttttctcatcagcgagagcaagcgtaagcgtttgattctcaatccaagtagataatagaacacgcatagagcttggaaattgcaattgatagctttctaataaaaccagctgagcacgacgttcagcaaccgtcattcccgctcgctctaataaaatacttttataaaaggcgccatcccatccggcaacgataacactactggcttgacgttgtgcttctgtagacataatacgctgtgtgcactcaatggtacgtaaccaaaatagcggattattgagcccttcatgataaaaagcagctaaagttttacattctgcccaacgataatcgatagttttttgtttaacaacgggggtttcaggctcaatattagcggtttcggtcagcgatttttgtgcacatccagcaagaaacataggcaacataatccaacacagatactgtttccagtgtgaagcgatcctcttaattgatgcaggggccatagataattgctcattagccagtgtctttcgctttaattttttatactgatgaaaagacacctgtttttgtgacctgatatgcattatttattctcagaaagtagcggtagttcaatacgaaaacagacatcagcatagtcagaatgaacaatatttaactcgccatccattcttttgatacagtcatgagcaatacttaaccccaaaccactcccttttacagcccctttacgtaatagagaaccttgaaaaaagggctcaaaaatcattttttgttctgattcagggatcggagtgcctttattggctatatcaataactattttctgttcaatttgataactagagatccagatattacccgattcagcgccatagtgcaccgcattcgagtagagattatcaataactcttgataataacgtcgtttctgctcgacattttttcagatcaagtgaaattatcgtcttaatgcctttcgctcgggcgggtaaactatgcgctaacaccacatcattcactaatgtggttaaatcaacttcctcaatttgctgaggtacttcggaaagtttacgattataatcaagtagttgctcaattaataattgaagttgtttactactattatcaagaatagctacgacttctttttgatctaaggttaaaggccctgctacttcatccgctaataattctgttccttcgcgcatactggctaacggtgtttttaactcatgagaaatatgacgtaaaaactcatggcgttgcgattctagccatgcaagacgttcacttaaccaaataatacgttgagctaaagagcgtaattcacgtggcccctgaaacgaattcaagttattatttaatgtacgcccttcccccaatcggttaatcattttttctatacctttaaccggaccgatgatcatacgggtaaataaggcaattaaaatcaggctaaaaacaaaaacaattaaactttgccaaccaaaataacgccctttttcagcaatagccatttgtagttgctcgccacgactaaaaataatctctttagttaacacgacaatgcggttattggcataagaaaattgctctaatgcttgttgcatttgagaagtgggttcactatttttgcattgaattgatttgagcgttttcaaagaagtattcaaggcttgtgcttctttagactcagaaagagggatgatagtctgctgcaaggtagagaacattttgctgtattgttgataacgctgttgatacatttcttcatcagttttatcacgcaatacacaatatcgtcgataatttccttccatttcaatagctaaattacgcatcacctcgctacgctcggtatccgctaacgcatttttattggtaatagcggcttggttactaagctgatccaaactttgataagcctgataggcaaggacgagaagcggtaacagcaccatccaaaatgccatgataaccaattgtcttaaagatcggggaaaaatacgccactttttcaatgaaatcatctcaacacctattagagtaatgcgatgctacatgacttaataacaagaaaaaagtccgacattgaaattcagataggaaaacgaacacaagcgagaacacgcaacaggctctagaaatgggagagcggaatatcttactgagatattccgctcgtcaatattcatctcttttctctctaaaagagaatgaaggtggtgcctcactccacgtgtcgccctgtgtttgataaggcccgaaggcgagtatcatgatgttggacggtaggcaccttactctggcgtcattcttggcttatgtggtatgttcccacccatattgtggaccgacataaaaagttgaatgagcaactgattaatataatgcacaaggcgtgccaacttttcgattaaaatcataaaacattaattttaaacgaaaaaatatttttatcttactaaaataaaaaacagccccaatttttgatagcgaaaaaatcaacaagctgtctccatttccagacaccgttaattaaaaaatattaaattattaaaattcaacaagttaaatgtcaccttttggcgacaatgaaaaaacgatgtgtcgtcgattttatacattgataattttttccttttatatcaacaaaataaagcccctctaacttgaggggctttgggttataacactgactcttttttattacatcattagtcaaattgctttctggcattacggaataagcgcatccaagggctatcttctccccaattttctggatgccaagaatggctcactgttctaaaaacgcgctcagggtgaggcatcatgattgttgagcggccatctgttgtggtaacagcggtgatcccttttactgatccgttagggtttaatgggtattgctctgttggttgaccatagtgatcaacaaaacgcagtcctactaaattttttgcttctaactgcgctaattgtgcagcgtcacgaaattcagcaaaaccttcaccatgagataccgcaattggcatctgtgaacccgccataccttgtaataatagcgacgggctatcagtcacttttactaagctaaagcgggcttcaaaacgctctgagcgattgcgtacaaagcgtggccataaatctgcccccggaataagctcggccaacgttgacatcatttggcaaccattacaaaccccaagtgataacgtatcttgacgtgcaaagaattgggcaaactcatcacgtaaacgatgattaaataaaatagatttagcccatccctcacccgcaccgagtacatcaccataagagaaaccaccacaagcaaccaatacatcaaaatcacttaatgagcgttgtgccgtatgtaaatcgctcatatgaacatcaatagcatcaaatccagcgcgatcaaaagctgctgccatttccacatgagagttaacaccttgctctcttaataccgcaatacgaggacgactgcctgtagcaatataaggcgccgcaatatcctctgcgggatcaaaggttaagtgaacatttaatcccggatcgtgactatcttgtttggcacgatgttcttcatctgcacattcaggattatcacgtaaacgttgcatttgccatgtcgtttcagcccaccagacacgtaatgtactacgcttttcatggtaaacttccgtttcacggctttgaataataatgtcatcacttggtgttgcttgccctaagtaatgtaaacaatctgctaaaccatgttcagtaaacagtgtttcaacgctttcttgatgctcccttttaatttggaacaccgcacctagctcttcattaaatagaccggctaaaatatcttcgtcataagcactgatatcaacattaaggccacaatgtcccgcaaacgccatttcggccaaagtcacaaataagccaccatcagagcggtcatgataagccagtaatttaccgtcgctcaccaattgttgaatgacattaaaaaactgttttaactgctctacatcacgtaaatcagccgctttttgtcctagctgacgataaacctgagctaatgctgttgcccctaatgcattatgaccattacctaaatcgattagatataaacggtttccttcttgggtagaaagctcaggggtgacagttttacgtacatcttcaacacgggaaaatgcggtgataactaaagagagaggggaaataacttctttcgttttcccttgttcatcttgccaacgcgttttcatggacattgagtccttacccaccggaatagtaatacctaattgtgggcatagctcttcaccaatggcttttactgcatcatataatcccgcatcttcaccagggtgacccgccgcagccatccagtttgcggaaagttttatacgattaagtgactgtacatcgcaacccgccatattggttaaggcttcacctaccgccattcgcgctgatgcggcaaaatctaatagtgcaataggggctctttcccctattgacatcgcctcgccgtaataactatctaatgtggccgttgttaccgcacagttagccaccggaatttgccaaggtccaaccatttggtcacgcgcaaccattcccgtaacactacgatcaccaatagtaattaagaacgtcttctcagcaacggcgggtaaatgaagtacgcgataaaccgcttcttttaaatcgatatctttacgatcgagatattcacctgctgttttatgtgatgtgacatcacgcaacattttcggcgctttacctaacaagatatctaaaggcatatctattggtttattatcaaaatgtgtatcatttaacactaactcacgctcttgtgttgcctcgccaatgacagcgtaaggggctctttctcgttggcatagcgcatcaaatagtggcattttttctggggataccgctaatacataacgctcttgcgactcattacaccagatctctagaggactcatacccggttcatcatttaaaacgttacgtaactcaaaacgacctccacgcccgccatcattgacaagctcaggcatggcattagaaagcccccccgctccgacatcatgaataaataaaatcgggttatcatcacctaattgccaacagcgatcgataacctcttggcaacgacgctccatttctgggttatctcgttgcacagaagcaaaatctaaatcagcatctgactggccggaagtcatagaagaagccgcaccaccgcctaggccgatattcatcgatgggccaccaagtacaattaacttagcacccacggagatctcacctttttgcacgtgatcttcgcgaatattaccaataccaccagccaacataataggtttatggtagcctcgaatttcaacaccattatgactattaacctgctcttcataggttctgaaataacctaataaggcggggcgaccaaattcattattaaatgcggctccacctaaagggccttctgtcataatgtccagtgcactgacaatacgttctggtctgccaaaatcttcttcccaaggttgttcaaaccccggaatacgtaagttagaaacggaaaaaccgactaaacccgctttaggttttgccccacggcctgtcgccccttcatcacgaatttcaccgccagagccggttgctgcaccaggccacggagaaattgccgttgggtgattgtgcgtttccactttcattaagatatggacaggctcttgatgataacggtaatgccctttttccgtatcgggataaaaacgcccagcaacggagccttccattacagcagcattatctttataagccgacaagacataatcaggagtttgctcaaaagtatttttaatcattttaaataatgatttgtcttgcgctttaccgtcgattatccaatctgcattaaaaattttatgacggcaatgctctgagtttgcttgagcgaacatataaagttctacatcagttggattgcgttgcaaacgtttaaaagcatctactagataatcaacttcatcatcagccagcgctaaccccatttcaatattggcagcaactagcgcatctttaccgtgagcaagaacatcaattgtttttaatggggtgggtgtctgttcagcaaatagcgcattaacttgttgataatcggtaaaaattgtttccatcatacgatcataaataaaaccgtataacaactgccactgttcttcggccatcgtatcgctatctatataataagcaataccacgttcaattctaaccacttgtgttaaaccacaattatgggcaatatctgtcgctttagtcgaccatggcgaaatggttcccggtcgtggtacaacaatacgcatctctccaacaagctcatgctctgttaatgaagggccatagtgcagtaacttgcttaatttagcttgttcatcttcagatagctgtccatccacttttacaaaatggataaactccgcataaataccacggacaggaagttggttttcctgacataaagttaatagtttattaatacgaaaagcggataaagcgggggagccacgcaggatttccataatattgagttctctcttttagcagctagcctgatcaatcattcaggggaaacgcgcctagtataatagaataactgctcagacgaaaccgtttgcgtgaacaaaataacagcatttaacttagcgtgttttcatcattaattggtgtaatcaagttgcgtcttagcaaaatgttgagcaaaatggtcgattactggaaatttatccatgtttaaatgactactttacacacaataaaaaacaacgttaacgagaaccaacctattgaacaatataaggattaactatttcgttatcgttatcatagcgctattttcagccgcgattattgcactgaatattacttggcctgacaggcaaaaagcgcagataaataagattttatctcgtggtgagcttagagtgagtactatcccttcaccactgataacgataaatgataaaaaggaccccgtaggtttcgattatgaattagtgaaacgctttgctgattatcttggcgtgaaacttgtcgttaatatgcggacgaatatcaaccaactctttgatgatctggagaataataaagcagactttattgccgctggattaatttataataaagaaaggctagatacgacacgaagtgggccagcctatttctcagtttctcaacaactgatctatcgtaaaggcacattgaggcctcgtcgttttgatgagcttaatgggcgccttgtcgtcgcagccggttcagctcatgccagcttattaaaaacattaaaagaaacgcaatatcctgaactcgaatgggaagaatcagagactaaaacgacttcacagctacttgaagagttatctgaaggtaaaataacttatgtactggccgattcaatcagcgtcgcggtacaacaacgcattcaccctaatgttgcagtcgcttttgaggtgacggaaagtcgtccattaacgtggtatttaccaaatcaagatgataatagtctgtatgcagccatgttggattacttcaatcaactttcccaagacgatgtgctcgcaagactagaagagaagtattttggtcatgttggttcatttgactactttgatacactctcttttattaccgccattgactcaatattacctaattatcaacctctgtttgaaaaatatgccgagacttttgattggcgtttattagcagcaatggcttggcaagaatcacattgggatccccatgccacgtcaccgacaggtgtaagaggcttaatgatgctaacacgtccaactgcgtcaagtatgggtataacagataggttagatcccgaagaaagtatcaaaggaggtgcacaatatttaaaacatcttctttctcgcctaccagatactatccctgatgatgaaaaaatctggtttgcacttgccgcttataacatgggatatggtcatatgttagatgcaagaaagctaaccgaacagcaaggcgccaatcctaatagctggttagatgtaaaagcgcggttacctttgctcagccaaaagaaatactatttagatcttccctatggttatgcgagaggacatgaagcttatcgttatgttgaaaatattcgtcgctatcaactcagtttagagggatacctacaagcaaaagagagtaaaaataagatcctatcgaaagacgaaaaagacgattcagccaatactgctttattaccgcctcgctccgtaggctcccccccttcatcttagttgtcaattatatagcctctttttaggggcttactaccctcgttttttattcatctaaccacaattttagcagcataatcctctctataccgtgccataacttggtatcctccccccttgaaggacgggttttactgcgaacttgataaaaaatgttactattttaatactttttttattaaaaatagttaaattactcatgttaaaaaaaataacaaattaatctaaaaccactcacagaatgagtaatttgacttaaaaacaaccaataaggctatttttagtacattggaataggttatatataagaaaatattaatataaatacttaatcattatctcactatttactattcattttgttattaatttcttacaaaaatcttatttatctatgaaaattaactttattattacaaataaagcttataaataactgaaaaatatactttattatattttattattagttttattaatttttttaaagttatgttaataacagcatagtttataacgttaatataatgttaatcatcatatctattaaatttctctgccatataaacttttttacccgtattaggagtaataaagggaatatttctatataaaaaactattaaaaaggaatttatagattaaaatatgaaaattgcacaaactaacaaaatcttatatcactgatagtatttttactgatatcatataaaccagtcattatccgacttgatgaaaaatgtaatgtacatcaatttttacatttggacatcaatactatttttatttttagtcaataataatacgtactaccttcaagggatcatctataatgaaactgagtaaaattgctttggctgcggctttagtatttggtattaattctgttgctacagctgaaaatgaaacgcctgcaccaaaagtaagttcaactaaaggcgaaattcaattaaaaggtgaaattgttaattcagcatgtggattagcagcatcttcaagccctgtaattgttgatttcagtgaaattccaacttctgcattagcaaatctgcaaaaagcaggaaatatcaaaaaagatattgaattacaagactgtgatacaactgtagcgaaaactgccacagttagctatacaccaagtgttgttaacgctgtaaataaagatttagcctcttttgtttctggtaacgcatctggcgcaggtattggcttaatggatgcaggtagtaaagcagttaaatggaatactgcaactacaccagtacaattaattaacggtgtatctaaaatcccattcgttgcttatgttcaagctgaatcagctgacgctaaagtaacgccaggtgaattccaagccgttatcaacttccaagttgattatcagtaatcatattgatttaaatatctaaattaataaataagtaattactgcgaaaacgcagaggatttcctctgcgttaaattcaataaaacacttcaatttaataaaaataaaaagtaattaaataaatatttattatttaattactttttatttaatataataattaggcgtttattcatgttaattccttattcaccccacacaatatggaagaccatttgtgcgactttgctattaagcttggcgtttttctcacaagcagagcaggacgattctgtggaatttaacattcatatgctagacgcggaagatcgcgataatgtcgacctttcacgtttttctacctcaaattatatcattccgggtatgtactatttagatattcgtctaaatggtcgcgactttcctcgccaaaatattaattatattgaagtagcagataatcattccgtggcttgtatcgaccctactcttttaaaaaagttaacaatcaaccaagaaaaccaaaaatatatcaaacaaatatcaccagattgttttgatattagccaattacccggtatctcgattaaaaatgatggtggtgtacttgatatcacgttaccgcgctcattaatgaaatatgaagaatctgattggacacctccggagctttgggatagcggggtctctgggcttatttttgattatacactaacaggaacgtcaactcgccctaataaaggcaataataacaatacgttaactggttatggtcaagcgggattaaacttgggtgaatggcgtttacgagctgaatatcaaggcaattattcttctgaatattcatctaacaatcgttttgattggaaccaaatttatgcctataagccattacctgatctcgcagctaaattaacggttggggaaacttatttaaactctcaaatttttgatagtttccgttttacaggagccaatttacaaagcgatgagagaatgttacccccttctctccaaggctatgcacctgaaattcatggcatcgccaataccaatgcaaaagtgacggtaacccaaaatggacgtttaatttatgagacaaccgtacctgctggccctttcgtgattaaccatctacaaaataccgtacagggtcaactcgatgttagagttgaagagcaaaatggtaagattaacgaatttcaagtgcaaaccgctaatttgccttatatgactcgcccaggatctgtgcgttttaatacctcactgggacagtcatccgtgaacaaccataaaatgcaaggccctcttttctatcaaggggatttttcatgggggatgaataatacatggtctctctatggtggtactttacttaccgctaaagattataacgcatggtctttaggtatcggccatgatatgggacgttttggtaccctttctggtgatattacacagtcttatagcaaaacctatgataatgaaaaaatcaatgggatgtcttttaaactaaactatgcaaaaacttttgatgagtaccacagtaccattacttttgcaggttatcgtttctcagaaaaaacatttcgctctttttctcagtatattgatgagcgttataacggcatcaataataatggctatgaaaaagaaatgtacaccattaccggtaataaaactttttgggcagatgatgcagagaaatcgaccaccctctatctctcttatcgccaccaaaattactgggataaaaatactcaagagcagtatggtgtcacagtaagtcgtaatttttccattatggggattgagcaaatcaataccaacttgtcagcatttcgtacccaatataaagggaatactgacgatacgctctcttttaatatttcactaccattaggaagtggtcgcaatattggttataacttgcaagataacaatggcaaagtgacacaaatggcctcttatgctgataatcgcgattataataatttatggcgcataagagcaggcttaagttcggataagaaagccaataccgatggttattatcaacatcgttctcagtatgcagaaatcaatgccaatgcaagctatcaacaagataattacttagcagtgggcgcaacgataaaaggcggttttactgctactcgttatggcgctgcattacacagtagcagtatgacctctagcaccgcaagaataatggtggatactgatggtgttgcaggggtgccctttaatggtcaaagcacgactacgaaccgcttcggcattggcgtactaaccgacttaacaagttataacaatgttgatgcacgtattgacgtcgataagatggatcaagatatcgaaacgcgtaaagccattgcttcaacaaccttaacagaaggtgccattggttattaccaatttccggttcgtcaaggtgaacgcttaatggctgtcttacagacaactgataataaataccctccttttggtgcggaagtcaccaatcaaaaaggggaaagtattggtatggtgatggaagaaggccttgtttatattgcgggtgttaaccttaatgaatcattaaatgtaatttggaacggtaaaacacaatgttcaattaccattcccgcggaaataacagatcccttaaaacatcaatcgctcgtttgtcaggatcgttaacaaataaaattaataatgagagataattaacatgaactcattcagcacactaaaaacactattttgtggctctttgctggcactgagtctagtgaatacaacacaagcgggtgtttcactggatagaactcgtattgtattaacgggtaatgaaaactcagccagtgttaatttaaaaaataccagccctgatattccttttttagcgcaatcttgggttgaaaatgaaaatgggcagaagatctcttcacccttagtggcacttccaccgttacaacgccttgatggtgctcaaaaaggcgtagttcgcattacaaaaacagctgaagttgggctattacctcaagatagagaatcactgttttatttaaatgtgcgtgaaattccccccgcaccaaaacaagccaacgtattacagatggcgatgcagtcacgcattaaattattctatcgtcctagtgccatagtacctgaaaaaccgggaatggtttggcaagatcaactggtgtttaaaaaacaaggtaataaatttattgttaataatccaaccccttattacatcacgattatctcactttctaataaattaaatggtgaggatagcgataaattaaccaccttccccggattaatggttgcgccaaaagcttcactggatataccagtaaaaaccagtaacgttaatcagttttatatgatgtatgtaaatgattacggtggacacccagagctcaaatttgtatgtcagcaagatagctgcaaagtagcccctaaagatcaacaacctaaatattaataaacttgatgccggtaggaataaaatgatcctcaataaaaaaaacattcattccaaatcagtaatgctattttgtgccggcattgtttctttaatgccattgcacgcaattgcttatttacaaggtgaagtgagaaccaatggtggccctaatattttctatgccgtattagatcacaccacctttcctaataacaaagcgggagaattagcaacagtaaacttttcgttgcctgatcgctatgatggcacggtatattgtcctaactcacgtatttatgatcgtgcattaacctattttaaagcaaccactgatttacctcctgttggtaataacttttatcaattaaatgagtatgttgatatcaaaattaattttgaaatttgggggcctaatcctttacccacagtgcccttttctgacatacctaataatagaaataaccaacaaggttgcagagtaccctcttcacctaaaccgcatatttcctcaggaagtagcggtcaactcactttccgtttaagaaaacccattattaatggtgtcagtcttaatgggcaatctcttgcacaaatgtatgccatggtaagtcacagcggtgcgccaaaaacctatggttcagagcccatttctaaattagtgatcacctcggggatcattaccactaaagataaatgtatttttaataatggttcaccaattacctttgactttggtaatgtgggaaatacctctgattatctcaatggacaaaactacaaaattactcgcaacatccccatcaaatgcgaagggggaagttttaccgatcctaatagcagaataatgtttaaagttcagactggtagctcaggtattgcgagttttgattctaactaccttggtacaacaggctctgtagatagaagtaacttaggtatcgtattaagagataagtcaggtacgattatcccacctaaccaatatttttcagttggcaaactcaataatttcaacggaaattgggaagtaagtgcagcccccatcgccaaagcgggcagtaaaattactgaaggtgaattttcagctcatgcgacactcattgcggagtttatgtaatgaaaaacagcataataaagtcagctataacttgcttgttattgctctctcctagcacttttgctgccactgatattattggtggagagatggaatttaaaggtgttgttgttgcacatggttgtacgattgttgcgggagatgaaaataaagttattgatttcaaacaaatatctgcaaaagatctctattcactacaaaaaagcaaccccgttgcttttagtatcagtttagaaaattgtagccaagatatttataaaagtgtcactatcacattagatggtcaagcacattcaacaatgcccaatcatatagccgttactgggagtggctcagaagatccgaaaagtattggtatcgcttttaccgacaaggcacataatattattgaattaaaaaaaccaagtgcccctcaacagcttaataataaacgagtacaatttaattttatggcctatgttgaagcaacatcatcagctattcaaaatcaaacgatactcacaggaccatttcaagcacaagcaacctatacactcaattaccaataacaattaagccaaatagatgctatttggctttctcttgtatgattaaaccttgagtaattaaacgttgctgttgtttcagttgttttttctctgcccttctcatcttaaaaaactggctcaagagttgtgcacactcctcacctaaaacacccgatgttatttcaactttatggttcatcccgggatgttgcaaaatatcaataaatgagcctgcggcacctgtttttagatcagatgcaccatagaccactctttttacacgactatgtacaattgctccagcacacataacgcaaggctctaacgtgatatataatgtggcgtcaagtaggcgataattctgtagatgtttcccacctttacgcaatgccataatttccgcatgtgcagtaggatcattatcaataatggagtgattccaacctttagcaatgattttattctcagcgactaacacggctcctacaggaatttcaccgagttgttgtgctttatgtgcctgctcaatcgctttatgcatccaataaatatcatctttaattttattcacaagaacatctcttcattattatacagcgcggtattgtagcctgttttagattgataactaaagatattagcgtgtgaaatgttgtaaaagatattcccctctgcaacatcaatatatttagaatctttcacgtatatgataatctcacactcttttgtatataattgtgtatttattttgtgtggcagtgctctattatttgtagtaacactgtcaatttgcagtaaaaatacaaccaataaactaaaagtaacatataagtgcaagatataagttactgtaatttaataatttatatattaagtgactgatatggctttactaattacgaagaaatgcatcaactgcgatatgtgtgaacccgaatgtcctaacgatgccatttcaatggggaatgatatttatgaaatcaatcctgatctttgcactgaatgtgtaggacattatgataaaccgacttgtcagtcggtatgccctatcacgaatacaattatcatcgatcctgctcatactgaatcgcaagatgaattatgggaaaagtttgtactgatccaccacgctgacaaaatctaagcaaacgcaatcgggaataaatttaagcgttatttttctaaaataacggttgcacaggcgtaacgttgctcatcagccagtgtcacgtgaatagcatttattcccgctttttgcgccatctcttttgccacagctaaaaactgcaatgttggtttacctaattcatcattagcgacttcaaaatggttaaatgc
